(19) United States
(12) Patent Application Publication
(10) Pub. No.: US 2014/0298539 A1
(43) Pub. Date: Oct. 2, 2014

(54) SPATIALLY MODIFIED GENE EXPRESSION IN PLANTS

(71) Applicants: Dominique Loque, Albany, CA (US); Henrik Vibe Scheller, Millbrae, CA (US)

(72) Inventors: Dominique Loque, Albany, CA (US); Henrik Vibe Scheller, Millbrae, CA (US)

(73) Assignee: THE REGENTS OF THE UNIVERSITY OF CALIFORNIA, Oakland, CA (US)

(21) Appl. No.: 13/982,231

(22) PCT Filed: Jan. 30, 2012
(86) PCT No.: PCT/US12/23182

§ 371 Date: Jan. 15, 2014

Related U.S. Application Data
(60) Provisional application No. 61/437,569, filed on Jan. 28, 2011.

(51) Int. Cl. C12N 15/82

(52) U.S. Cl. CPC C12N 15/8255; C12N 15/8247
USPC 800/281; 435/99; 435/419; 800/278; 800/285; 800/287; 800/298

(57) ABSTRACT

The invention provides methods of engineering plants having lignin deposition or xylan deposition that is substantially localized to the vessels of xylem tissue in the plant. The invention also provides methods of engineering plants to increase production of a desired biosynthetic product, e.g., to have increased secondary cell wall deposition or increased wax/cutin accumulation. The engineered plants of the present invention have use in bioenergy production, e.g., by improving the density and the digestibility of biomass derived from the plant and to improve water usage requirements.

### CROSS-REFERENCE TO RELATED APPLICATIONS

[0001] This application claims benefit of U.S. provisional application No. 61/437,569, filed Jan. 28, 2011, which is herein incorporated by reference for all purposes.

### STATEMENT AS TO RIGHTS TO INVENTIONS MADE UNDER FEDERALLY SPONSORED RESEARCH AND DEVELOPMENT

[0002] This invention was made with government support under Contract No. DE-AC02-05CH11231 awarded by the U.S. Department of Energy. The government has certain rights in this invention.

### BACKGROUND OF THE INVENTION

[0003] Plant cell wall is the only source of cellulose for the paper industry and is a promising source of sugar for lignocellulosic biofuels. The utilization of plants to convert solar energy into transportable and storable energy will have a positive impact on the environment, since using plants can help to drastically reduce the utilization of fossil-derived fuels, can reduce carbon emission into the atmosphere, and even can contribute to carbon sequestration. However, even if lignocellulosic biofuels will be beneficial for the environment, the cost to produce them is still not cost-effective, mainly due to the expensive raw sugar derived from plant cell wall. The low density, recalcitrance to enzymatic hydrolysis, and medium content in cellulose are the main contributors to the sugar cost because they impact transportation cost and require high amount of energy and chemicals. Therefore, improving the density and the digestibility of the raw biomass will have an important beneficial impact on the cost of lignocellulosic biofuels production.

[0004] Cell wall recalcitrance is mainly caused by the presence of lignin, which embeds the polysaccharide polymers and reduces their extractability and accessibility to hydrolytic enzymes. Lignin content and saccharification efficiency of plant cell wall usually are highly negatively correlated (Vinzant et al., 1997; Chen et al., 2007; Jorgensen et al., 2007). Unfortunately, most attempts at reduction of plant lignin content resulted in severe biomass yield reduction (Voelker et al., 2010; Shadle et al., 2007; Franke et al., 2002) and therefore, crops with significant lignin reduction are not readily available. This cell wall-growth relation is not unique to lignin; it is commonly observed and correlated with vessel collapse and occurs most of the time when secondary cell wall genes involved in hemicellulose or cellulose biosynthesis are defective (Voelker et al., 2010; Anterola and Lewis, 2002; Brown et al., 2005). These vessels are essential to feed above-ground tissues with water and nutrients absorbed by the root system (Gomez et al., 2008, Boyce et al., 2004). Hence, silencing strategies, which compromise between the level of the enzymatic step inhibition and biomass yield, are used to reduce lignin in plants.

[0005] In woody tissues, a new cell wall, so-called secondary cell wall, is produced and is the main component contributing to biomass density when water is removed. Optimizing cell wall deposition would increase biomass density and therefore energy density. This improvement would be beneficial in reducing the transportation cost of biomass, a significant component in the price of the biomass delivered at the gate of the biorefinery (Searcy et al., 2007; Aden et al., 2002; Kumar et al., 2005). Therefore, developing strategies allowing the thickening of cell wall of woody tissues or pith without altering plant growth can increase biomass and energetic density and would be favorable to the cost-effectiveness of lignocellulosic bioenergy production.

[0006] There is an additional need to engineer various biosynthetic pathways in path in a manner such that the production of biosynthetic product can be targeted in a tissue of interest.

[0007] This invention addresses these needs.

### BRIEF SUMMARY OF THE INVENTION

[0008] Various biological processes exist in organisms from prokaryotes to eukaryotes that are regulated by a small number of transcription factors. In one aspect, this invention provides a positive feedback loop to increase expression of desired products in an organism, e.g., a plant. An artificial positive feedback loop (AFPL) in accordance with the invention employs a transcription factor/promoter construct, typically where the transcription factor is a “master” transcription factor that modulates expression of all or most of the components of a targeted biosynthetic pathway. A promoter from a gene that is downstream in the pathway, where the transcription factor induces or increases expression of the gene, is operably linked to a nucleic acid encoding the transcription factor such that increased expression of the transcription factor results. An AFPL can be used in any biosynthetic process in plants, e.g., to control cell wall deposition, wax/cutin accumulation, or lipid accumulation, and the like.

[0009] In one aspect, the invention provides a method of engineering a plant to increase the production of a biosynthetic product in a desired tissue, the method comprising: introducing an expression cassette into the plant, wherein the expression cassette comprises a polynucleotide encoding a transcription factor that regulates production of the biosynthetic product operably linked to a heterologous promoter, wherein the heterologous promoter is a promoter that induces gene expression of a gene that is a downstream target of the transcription factor in the desired tissue; and culturing the plant under conditions in which the transcription factor is expressed. The method may be applied to any plant, including monocots and dicots. In some embodiments, the plant is Arabidopsis, poplar, eucalyptus, rice, corn, switchgrass, sorghum, millet, miscanthus, sugarcane, pine, alfalfa, wheat, soy, barley, turfgrass, tobacco, hemp, poppy, bamboo, rape, sunflower, willow, or Brachypodium.

[0010] In some embodiments, the promoter is a tissue-specific secondary wall promoter and the transcription factor induces expression of secondary wall biosynthetic products. For example, the transcription factor may be NAC secondary wall-thickening promoting factor 1 (NST1), NST2, NST3, secondary wall-associated NAC domain protein 2 (SND2), SND3, MYB domain protein 103 (MYB103), MBY85, MYB46, MYB83, MYB58, or MYB63. In some embodiments, the tissue-specific secondary wall promoter is an IRX1, IRX3, IRX5, IRX8, IRX9, IRX14, IRX7, IRX10, GAUT13, GAUT14, or CESA4 promoter.

[0011] In some embodiments, of the methods of engineering a plant to increase production of a biosynthetic product in a desired tissue, the transcription factor induces expression of wax and/or cutin. In some embodiments, the transcription factor is a shine (SHN) transcription factor selected from SHN1 (also known as WIN1), SHN2, SHN3, SHN4, or SHN5; or MYB 96. In some embodiments, the promoter is a CER1, CER2, CER3, CER4, CER5, CER6, CER10, WSD1, Mah1, WBC11, KCS1, KCS2, FATB, LACS1, LACS2, CYP864A, CYP86A7, CYP86A5, KCS10, or KCS5 promoter.

[0012] In a further aspect, the invention provides a plant comprising an expression cassette that comprises a polynucleotide encoding a transcription factor that regulates production of a biosynthetic product operably linked to a heterologous promoter, wherein the heterologous promoter is a promoter that induces gene expression of a gene that is a downstream target of the transcription factor in the desired tissue; and culturing the plant under conditions in which the transcription factor is expressed. The plant may be any plant, including monocots and dicots. In some embodiments, the plant is Arabidopsis, poplar, eucalyptus, rice, corn, switchgrass, sorghum, millet, miscanthus, sugarcane, pine, alfalfa, wheat, soy, barley, turfgrass, tobacco, hemp, poppy, bamboo, rape, sunflower, willow, or Brachypodium.

[0013] In some embodiments, the plant comprises an expression construct in which the promoter is a tissue-specific secondary wall promoter and the transcription factor encoded by the construct induces expression of secondary wall biosynthetic products. For example, the transcription factor may be NAC secondary wall-thickening promoting factor 1 (NST1), NST2, NST3, secondary wall-associated NAC domain protein 2 (SND2), SND3, MYB domain protein 103 (MYB103), MBY85, MYB46, MYB83, MYB58, or MYB63. In some embodiments, the tissue-specific secondary wall promoter is an IRX1, IRX3, IRX5, IRX8, IRX9, IRX14, IRX7, IRX10, GAUT13, GAUT14, or CESA4 promoter.

[0014] In some embodiments, the transcription factor encoded by the expression construct induces expression of wax and/or cutin. In some embodiments, the transcription factor is a shine (SHN) transcription factor selected from SHN1 (also known as WIN1), SHN2, SHN3, SHN4, or SHN5; or MYB 96. In some embodiments, the promoter is a CER1, CER2, CER3, CER4, CER5, CER6, CER10, WSD1, Mah1, WBC11, KCS1, KCS2, FATB, LACS1, LACS2, CYP864A, CYP86A7, CYP86A5, KCS10, or KCS5 promoter.

[0015] In one aspect, the present invention provides methods of engineering a plant having lignin deposition that is substantially localized to the vessels of xylem tissue of the plant. In some embodiments, the method comprises:
[0016] introducing an expression cassette into the plant, wherein the plant is modified to have a reduced level of expression of a lignin biosynthesis enzyme; and further, wherein the expression cassette comprises a polynucleotide encoding the lignin biosynthesis enzyme operably linked to a heterologous vessel-specific promoter; and
[0017] culturing the plant under conditions in which the lignin biosynthesis enzyme is expressed.

[0018] In some embodiments, the lignin biosynthesis enzyme is PAL, C4H, 4CL, HCT, C3H, or CCR1. In some embodiments, the lignin biosynthesis enzyme is C4H.

[0019] In some embodiments, the promoter is a VND1, VND2, VND3, VND4, VND5, VND6, VND7, VNI2, REF4 or RFR1, e.g., a promoter substantially identical to a VND1, VND2, VND3, VND4, VND5, VND6, VND7, VNI2, REF4 or RFR1 promoter; or a native VND1, VND2, VND3, VND4, VND5, VND6, VND7, VNI2, REF4 or RFR1 promoter.

[0020] In some embodiments, the level of activity of the lignin biosynthesis enzyme in the modified plant is reduced by contacting the plant with an antisense oligonucleotide that silences expression of the gene encoding the lignin biosynthesis enzyme. In some embodiments, the modified plant in which the polynucleotide operably linked to the heterologous promoter is expressed has a mutation in the gene encoding the lignin synthesis enzyme that decreases expression of the enzyme.

[0021] In some embodiments, the plant is selected from the group consisting of Arabidopsis, poplar, eucalyptus, rice, corn, switchgrass, sorghum, millet, miscanthus, sugarcane, pine, alfalfa, wheat, soy, barley, turfgrass, tobacco, hemp, bamboo, rape, sunflower, willow, and Brachypodium.

[0022] In some embodiments, the present invention provides plants, plant cells, seeds, flowers, leave, fruit, or biomass comprising plant tissue engineered to have lignin deposition that is substantially localized to the vessels of xylem tissue of the plant.

[0023] In another aspect, the present invention provides methods of obtaining an increased amount of soluble sugars from a plant in a saccharification reaction. In some embodiments, the method comprises subjecting a plant engineered to have lignin deposition that is substantially localized to the vessels of xylem tissue of the plant to a saccharification reaction, thereby increasing the amount of soluble sugars that can be obtained from the plant as compared to a wild-type plant.

[0024] In still another aspect, the present invention provides methods of engineering a plant having increased secondary cell wall deposition. In some embodiments, the method comprises:
[0025] introducing an expression cassette into the plant, wherein the expression cassette comprises a polynucleotide encoding a transcription factor that regulates the production of secondary cell wall in woody tissue operably linked to a heterologous promoter, wherein the promoter is substantially identical to the native promoter of a gene that is a downstream target of the transcription factor; and
[0026] culturing the plant under conditions in which the transcription factor is expressed. In some embodiments, the promoter and the transcription factor, or either the promoter or the transcription factor are from a different plant species than the host cell in which the artificial positive feedback loop is created. In further embodiments, the transcription factor and the promoter are from different plant species.

[0027] In some embodiments, the transcription factor is NST1, NST2, NST3, MYB103, MYB85, MYB46, MYB83, MYB58, or MYB63. In some embodiments, the transcription factor is NST1.

[0028] In some embodiments, the promoter is an IRX1, IRX3, IRX5, IRX8, IRX9, IRX14, IRX7, or IRX10 promoter. In some embodiments, the promoter is a native IRX1, IRX3, IRX5, IRX8, IRX9, IRX14, IRX7, or IRX10 promoter.

[0029] In some embodiments, the plant in which the polynucleotide operably linked to the heterologous promoter is expressed is a wild-type plant. In some embodiments, the plant in which the polynucleotide operably linked to the heterologous promoter is expressed is an engineered plant having lignin deposition that is substantially localized to the vessels of xylem tissue of the plant.

[0030] In some embodiments, the plant is selected from the group consisting of Arabidopsis, poplar, eucalyptus, rice, corn, switchgrass, sorghum, millet, miscanthus, sugarcane, pine, alfalfa, wheat, soy, barley, turfgrass, tobacco, hemp, bamboo, rape, sunflower, willow, and Brachypodium.

[0031] In some embodiments, the present invention provides plants, plant cells, seeds, flowers, leave, fruit, or biomass comprising plant tissue engineered to have increased secondary cell wall deposition.

[0032] In yet another aspect, the present invention provides methods of increasing bioenergy production from biomass derived from a plant. In some embodiments, the method comprises harvesting biomass from a plant engineered to have increased secondary cell wall deposition; and subjecting the biomass to a conversion reaction, thereby increasing bioenergy production as compared to a wild-type plant.

[0033] Ina further aspect, the present invention provides methods of increasing stem/straw/timber strength, which can reduce lodging, and increase wood density from a plant. Thus, the invention provides a method of increasing stem, straw or timber strength from plants during growth, the method comprising: cultivating plants engineered to have increased secondary cell wall deposition, thereby improving resistance lodging as compared to a wild type plants. Plants having increased secondary wall deposition may also be cultivated to provide plants, or biomass from such plants that have increased resistance to mechanical stress compared to a wildtype plant.

[0034] In yet another aspect, present invention provides methods of engineering a plant having xylan deposition that is substantially localized to the vessels of xylem tissue of the plant. In some embodiments, the method comprises:
[0035] introducing an expression cassette into the plant, wherein the plant is modified to have a reduced level of activity of a xylan biosynthesis enzyme; and further, wherein the expression cassette comprises a polynucleotide encoding the xylan biosynthesis enzyme operably linked to a heterologous vessel-specific promoter; and
[0036] culturing the plant under conditions in which the xylan biosynthesis enzyme is expressed. In some embodiments, the plant into which the expression cassette is introduced is modified to have a reduced leve of expression of a xylan biosynthesis enzyme.

[0037] In some embodiments, the xylan biosynthesis enzyme is irregular xylem 8 (IRX8), IRX14, IRX14-like, IRX9, IRX9-like, IRX7, IRX10, IRX10-like, IRX15, IRX15-like, F8H, or PARVUS.

[0038] In some embodiments, the promoter is a VND1, VND2, VND3, VND4, VND5, VND6, VND7, VNI2, REF4 or RFR1, e.g., a promoter substantially identical to a VND1, VND2, VND3, VND4, VND5, VND6, VND7, VNI2, REF4 or RFR1 promoter; or a native VND1, VND2, VND3, VND4, VND5, VND6, VND7, VNI2, REF4 or RFR1 promoter.

[0039] In some embodiments, the level of activity of the xylan biosynthesis enzyme in the modified plant is reduced by contacting the plant with an antisense oligonucleotide that silences expression of the gene encoding the xylan biosynthesis enzyme. In some embodiments, the modified plant in which the polynucleotide operably linked to the heterologous promoter is expressed has a mutation in the gene encoding the xylan synthesis enzyme that decreases expression of the enzyme. In some embodiments, the activity of the xylan biosynthesis enzyme in the modified plant is reduced by contacting the plant with a mutated xylan biosynthesis gene that encodes a protein with a dominant negative mutation and causes a decrease in xylan biosynthesis.

[0040] In some embodiments, the plant is selected from the group consisting of Arabidopsis, poplar, eucalyptus, rice, corn, switchgrass, sorghum, millet, miscanthus, sugarcane, pine, alfalfa, wheat, soy, barley, turfgrass, tobacco, hemp, bamboo, rape, sunflower, willow, and Brachypodium.

[0041] In some embodiments, the present invention provides plants, plant cells, seeds, flowers, leave, fruit, or biomass comprising plant tissue engineered to have xylan deposition that is substantially localized to the vessels of xylem tissue of the plant.

[0042] In yet another aspect, the present invention provides methods of obtaining an increased amount of soluble sugars from a plant in a saccharification reaction. In some embodiments, the method comprises subjecting a plant engineered to have xylan deposition that is substantially localized to the vessels of xylem tissue of the plant to a saccharification reaction, thereby increasing the amount of soluble sugars that can be obtained from the plant as compared to a wild-type plant.

[0043] In still another aspect, the present invention provides methods of engineering a plant having xylan O-acetylation that is substantially localized to the vessels of xylem tissue of the plant. In some embodiments, the method comprises:
[0044] introducing an expression cassette into the plant, wherein the plant is modified to have a reduced level of expression of an enzyme responsible for xylan O-acetylation; and further, wherein the expression cassette comprises a polynucleotide encoding the xylan O-acetylation enzyme operably linked to a heterologous vessel-specific promoter; and culturing the plant under conditions in which the xylan O-acetylation enzyme is expressed.

[0045] In some embodiments, the xylan O-acetylation enzyme is an RWA protein.

[0046] In some embodiments, the xylan O-acetylation enzyme is a member of the Trichome Birefringence Like family of proteins (PF03005 family also known as Domain of Unknown Function 231).

[0047] In some embodiments, the promoter is a VND1, VND2, VND3, VND4, VND5, VND6, VND7, VNI2, REF4 or RFR1, e.g., a promoter substantially identical to a VND1, VND2, VND3, VND4, VND5, VND6, VND7, VNI2, REF4 or RFR1 promoter; or a native VND1, VND2, VND3, VND4, VND5, VND6, VND7, VNI2, REF4 or RFR1 promoter.

[0048] In some embodiments, the level of expression of the xylan O-acetylation enzyme in the modified plant is reduced by contacting the plant with an antisense oligonucleotide that silences expression of the gene encoding the xylan O-acetylation enzyme. In some embodiments, the modified plant in which the polynucleotide operably linked to the heterologous promoter is expressed has a mutation in the gene encoding the xylan O-acetylation enzyme that decreases expression of the enzyme.

[0049] In some embodiments, the plant is selected from the group consisting of Arabidopsis, poplar, eucalyptus, rice, corn, switchgrass, sorghum, millet, miscanthus, sugarcane, pine, alfalfa, wheat, soy, barley, turfgrass, tobacco, hemp, bamboo, rape, sunflower, willow, and Brachypodium.

[0050] In some embodiments, the present invention provides plants, plant cells, seeds, flowers, leave, fruit, or biomass comprising plant tissue engineered to have xylan deposition that is substantially localized to the vessels of xylem tissue of the plant.

[0051] In yet another aspect, the present invention provides methods of obtaining an increased amount of soluble sugars from a plant in a saccharification reaction. In some embodiments, the method comprises subjecting a plant engineered to have xylan O-acetylation that is substantially localized to the vessels of xylem tissue of the plant to a saccharification reaction, thereby increasing the amount of soluble sugars that can be obtained from the plant as compared to a wild-type plant.

### BRIEF DESCRIPTION OF THE DRAWINGS

[0052] FIG. 1. Phenylalanine ammonia-lyase (PAL) alignment. The protein sequences for PAL from Arabidopsis thaliana (“AtPAL1”), Physcomitrella patens (moss) (“PpPAL3”), Oryza sativa (rice) (“OsPAL”), Zea mays (maize) (“ZmPAL”), Sorghum bicolor (sorghum) (“SbPAL”), Pinus massoniana (pine) (“PlPAL”), Medicago sativa (alfalfa) (“MsPAL”), Triticum aestivum (wheat) (“TaPAL”), Glycine max (soybean) (“GmPAL2”), Beta vulgaris (sugar beet) (“BvPAL”), Nicotiniana tabacum (tobacco) (“NtPAL1”), Solanum tuberosum (potato) (“StPAL1”), Bambusa oldhamii (bamboo) (“BoPAL”), Brassica rapa (“BnPAL1”), Helianthus annuus (sunflower) (“HaPAL”), Ricinus communis (“RcPAL”), Vitis vinifera (grape) (“VvPAL”), Jatropha curcas (“JcPAL”), Euphorbia pulcherrima (poinsettia) (“EpPAL”), Trifolium pratense (clover) (“TpPAL”), Lotus japonicus (“LjPALS”), and Selaginella moellendorffii (spike moss) (“SmPAL”) were aligned using ClustalW.

[0053] FIG. 2. Cinnamate 4-hydroxylase (C4H) alignment. The protein sequences for C4H from Arabidopsis thaliana (“AtC4H”), Pinus taeda (pine) (“PtC4H”), Oryza sativa (rice) (“OsC4H”), Zea mays (maize) (“ZmC4H”), Sorghum bicolor (sorghum) (“SbC4H”), Medicago truncatula (“MtC4H”), Triticum aestivum (wheat) (“TaC4H”), Glycine max (soybean) (“GmC4H”), Nicotiniana tabacum (tobacco) (“NtC4H”), (“StC4H”), Solanum tuberosum (potato) (“StC4H”), Bambusa oldhamii (bamboo) (“BoC4H”), Brassica napus (“BnC4H1”), Helianthus annuus (sunflower) (“HaC4H”), Ricinus communis (“RcC4H”), Vitis vinifera (grape) (“VvC4H”), Euphorbia pulcherrima (poinsettia) (“EpC4H”), Trifolium pratense (clover) (“TpC4H”), and Selaginella moellendorffii (spike moss) (“SmC4H”) were aligned using ClustalW.

[0054] FIG. 3. 4-coumarate-CoA ligase (4CL) alignment. The protein sequences for 4CL from Arabidopsis thaliana (“At4CL2” and “At4CL1”), Nicotiniana tabacum (tobacco) (“Nt4CL1” and “Nt4CL2”), Eucalyptus camaldulensis (“Ec4CL”, “Ec4CL1”, and “Ec4CL2”), Pinus taeda (pine) (“Pt4CL” and “Pt4CL1”), Glycine max (soybean) (“Gm4CL1”), Oryza sativa (rice) (“Os4CL3” and “Os4CL4”), Sorghum bicolor (sorghum) (“Sb4CL”), Zea mays (maize) (“Zm4CL”), Panicum virgatum (switchgrass) (“Pv4CL”), Lolium perenne (ryegrass) (“Lp4CL3”), Selaginella moellendorffii (spike moss) (“Sm4CL1”), and Physcomitrella patens (moss) (“Pp4CL1”) were aligned using ClustalW.

[0055] FIG. 4. Hydroxycinnamoyl CoA: shikimate hydroxycinnamoyl transferase (HCT) alignment. The protein sequences for HCT from Arabidopsis thaliana (“AtHCT”), Arabidopsis lyrata (“A1HCT”), Pinus taeda (pine) (“PtHCT”), Ricinus communis (“RcHCT”), Coffea canephora (“CcHCT”), Vitis vinifera (grape) (“VvHCT”), Nicotiniana tabacum (tobacco) (“NtHCT”), Trifolium pratense (clover) (“TpHCT”), Oryza sativa (rice) (“OsHCT” and “OsHCT3”), Sorghum bicolor (sorghum) (“SbHCT”), Zea mays (maize) (“ZmHCT” and “ZmHCT2”), Avena sativa (oat) (“AsHCT”), and Selaginella moellendorffii (spike moss) (“SmHCT1” and “SmHCT2”) were aligned using ClustalW.

[0056] FIG. 5. Coumaroyl shikimate 3-hydroxylase (C3H) alignment. The protein sequences for C3H from Arabidopsis thaliana (“AtC3H”), Eucalyptus globulus (“EgC3H”), Ricinus communis (“RcC3H”), Vitis vinifera (grape) (“VvC3H”), Glycine max (soybean) (“GmC3H”), Trifolium pratense (clover) (“TpC3H”), Medicago truncatula (“MtC3H”), Coffea canephora (“CcC3H”), Osimum basilicum (basil) (“ObC3H”), Pinus taeda (pine) (“PtC3H”), Nicotiniana tabacum (tobacco) (“NtC3H”), Ginkgo biloba (“GbC3H”), (“SbC3H”), Zea mays (maize) (“ZmC3H”), Oryza sativa (rice) (“OsC3H”), Triticum aestivum (wheat) (“TaC3H”), Selaginella moellendorffii (spike moss) (“SmC3H”), and Physcomitrella patens (moss) (“FpC3H”) were aligned using ClustalW.

[0057] FIG. 6. Cinnamoyl-CoA reductase (CCR) alignment. The protein sequences for CCR from Arabidopsis thaliana (“AtCCR1”), Solanum lycopersicum (tomato) (“SlCCR”), Euphorbia pulcherrima (poinsettia) (“EpCCR”), Solanum tuberosum (potato) (“StCCR”), Eucalyptus gunnii (“EgCCR”), Vitis vinifera (grape) (“VvCCR”), Ricinus communis (“RcCCR”), Pinus taeda (pine) (“PtCCR”), Glycine max (soybean) (“GmCCR”), Picea abies (spruce) (“PaCCR”), Pinus massoniana (pine) (“PmCCR”), Oryza sativa (rice) (“OsCCR”), Lolium perenne (ryegrass) (“LpCCR”), Panicum virgatum (switchgrass) (“PvCCR”), Sorghum bicolor (sorghum) (“SbCCR”), Saccharum officiunarum (sugarcane) (“SoCCR”), Hordeum vulgare (barley) (“HvCCR”), Zea mays (maize) (“ZmCCR”), and Selaginella moellendorffii (spike moss) (“SmCCR”) were aligned using ClustalW.

[0058] FIG. 7. IRX8 sequence alignment. Alignment of amino acid sequences of Arabidopsis IRX8 (GAUT12) and homologous proteins. The alignment was made with COBALT (Papadopoulos J S and Agarwala R (2007) COBALT: constraint-based alignment tool for multiple protein sequences, Bioinformatics 23:1073-79). Proteins are identified by their GenBank protein IDs. gi15239707: IRX8 from Arabidopsis thaliana; gi2241262287: homolog from Populus trichocarpa, gi224117396: homolog from P. trichocarpa, gi224141469: homolog from P. trichocarpa, gi224077712: homolog from P. trichocarpa; gi302803855: homolog from Selaginella moellendorffii; gi30678270: GAUT13 from A. thaliana; gi30685369: GAUT14 from A. thaliana; gi115489272: homolog from Oryza sativa; gi224131384: homolog from P. trichocarpa; gi22331857: GAUT15 from A. thaliana.

[0059] FIG. 8. IRX14 alignment. Alignment of amino acid sequences of Arabidopsis IRX14 and homologous proteins. The alignment was made with COBALT (Papadopoulos J S and Agarwala R (2007) COBALT: constraint-based alignment tool for multiple protein sequences, Bioinformatics 23:1073-79). Proteins are identified by their GenBank protein IDs. gi|30690793: IRX14 from A. thaliana; gi|15240245: IRX14-like from A. thaliana; gi|224096716 and gi|224081752: homologs from P. trichocarpa; gi|302797519: homolog from S. moellendorffii; gi|115469624: homolog from O. sativa.

[0060] FIG. 9. IRX9 alignment. Alignment of amino acid sequences of Arabidopsis IRX9 and homologous proteins. The alignment was made with COBALT (Papadopoulos J S and Agarwala R (2007) COBALT: constraint-based alignment tool for multiple protein sequences, Bioinformatics 23:1073-79). Proteins are identified by their GenBank protein IDs. gi|15228084: IRX9 from A. thaliana; gi|224140167 and gi|224069352: homologs from P. trichocarpa; gi|297600755 and g|115461821: homologs from O. sativa; gi|224092304: homolog from P. trichocarpa; gi|302759368: Homolog from S. moellendorffii; gi|42571663: IRX9-like from A. thaliana; gi|224063335: homolog from P. trichocarpa; gi|115439133, gi|115474279, gi|115465403 451, gi|115481434 and gi|115456794: homologs from O. sativa.

[0061] FIG. 10. IRX7 alignment. Alignment of amino acid sequences of Arabidopsis IRX7 (FRA8) and homologous proteins. The alignment was made with COBALT (Papadopoulos J S and Agarwala R (2007) COBALT: constraint-based alignment tool for multiple protein sequences, Bioinformatics 23:1073-79). Proteins are identified by their GenBank protein IDs. gi|42570324: IRX7 from A. thaliana; gi|224106838: homolog from P. trichocarpa; gi|42568020: IRX7-like (F8H) from A. thaliana; gi|115450193: homolog from O. sativa; gi|302786830 and gi|302826405: homologs from S. moellendorffii.

[0062] FIG. 11. IRX10 alignment. Alignment of amino acid sequences of Arabidopsis IRX10 and homologous proteins. The alignment was made with COBALT (Papadopoulos J S and Agarwala R (2007) COBALT: constraint-based alignment tool for multiple protein sequences, Bioinformatics 23:1073-79). Proteins are identified by their GenBank protein IDs. gi|18424516: IRX10-like (GUT1) from A. thaliana; gi|224119858: homolog from P. trichocarpa; gi|15223522: IRX10 (GUT2) from A. thaliana; gi|224053575 and gi|224075447: homologs from P. trichocarpa; gi|115441967: Os01g0926600 from O. sativa; gi|302783378: GT47D1 from S. moellendorffii; gi|115458146: Os04g0398600 from O. sativa; gi|115441965: Os01g0926400 from O. sativa; gi|115481310: Os10g0180000 from O. sativa; gi|224106838: homolog from P. trichocarpa.

[0063] FIG. 12. Parvus sequence alignment. Alignment of amino acid sequences of Arabidopsis PARVUS (GATL1) and homologous proteins. The alignment was made with COBALT (Papadopoulos J S and Agarwala R (2007) COBALT: constraint-based alignment tool for multiple protein sequences, Bioinformatics 23:1073-79). Proteins are identified by their GenBank protein IDs. gi|18394719: PARVUS from A. thaliana. The other proteins are some of the homologs from A. thaliana, P. trichocarpa, and O. sativa, and the single homolog from S. moellendorffii (gi|302807664).

[0064] FIG. 13. NAC secondary wall-thickening promoting factor (NST) alignment. The protein sequences for NST from Arabidopsis thaliana (“AtNST1”, “AtNST2”, and “SND”), Pinus taeda (pine) (“PtNAC023”, “PtNAC065”, and “PtNAC”), Medicago truncatula (“MtNAC1”), Glycine max (soybean) (“GmNAM1”), Vitis vinifera (grape) (“VvNST”), Ricinus communis (“RcNST”), Eucalyptus gunnii (“EgNST”), Zea mays (maize) (“ZmNST”), Sorghum bicolor (sorghum) (“SbNST”), Oryza sativa (rice) (“OsNAC7” and “OsNST”), Picea sitchensis (spruce) (“PsNST”), apple (“AppleT”), and Selaginella moellendorffii (spike moss) (“SmNST1”) were aligned using ClustalW.

[0065] FIG. 14. Transcriptional network regulating secondary cell wall biosynthesis. Major transcription factors regulating secondary cell wall deposition in tracheary elements and fibers are presented as well as several of the downstream target genes that are induced during secondary cell wall biosynthesis. The transcription factors presented are able to induce expression of genes involved in cellulose, hemicellulose and/or lignin biosynthesis. The drawing is adapted from Zhong et al., 2007.

[0066] FIG. 15. Lignin analysis of cell wall of engineered plant lines. A. Lignin quantification using the acetyl bromide method on senesced stems from wild-type (W) and engineered (“Eng Lig I”) (ref3-2+pVND6:C4H) plants. B. Bright-light images of stem cross-sections stained with phloroglucinol of same-age wild-type (W) and two engineered Eng Lig I plants from left to right respectively.

[0067] FIG. 16. Analysis of the Eng Lig I line. A. Plant growth phenotype of Eng Lig I compared at two different growth stages. The top panel represents the vegetative stage and the bottom panel represents the adult stage (bolting stage). Wild-type plants are shown on the left and the engineered Eng Lig I plants are shown on the right in A-D. B. Sugar released from dry stems pretreated with NaOH and incubated with a cellulase cocktail for 0, 24, or 48 hrs. C. Sugar released from dry stems pretreated with hot water and incubated with a cellulase cocktail for 0, 24, or 48 hrs. D. Sugar released from dry stems pretreated with dilute acid and incubated with a cellulase cocktail for 0, 24, or 48 hrs.

[0068] FIG. 17. Analysis of the Eng Lig II line. A. Plant growth phenotype of Eng Lig II (ref3-2+pVND6:C4H+ pIRX8:NST1) compared at two different growth stages. The top panel represents the vegetative stage and the bottom panel represents the adult stage (bolting stage). Wild-type plants are shown on the left and the engineered Eng Lig II plants are shown on the right. B. Bright-light images of stem cross-sections stained with phloroglucinol of same-age wild-type (W), ref3-2 mutant, and the engineered Eng Lig II plants from left to right respectively. C. Lignin quantification using the acetyl bromide method on senesced stems from wild-type (W), engineered Eng Lig I, and engineered Eng Lig II plants.

[0069] FIG. 18. Transmission electron micrographs of cross-sections through wild-type (A, C) and engineered (ref3-2+pVND6:C4H+pIRX8:NST1) (B, D) plants. A-B. Xylem tissues of the plants. C-D. Interfascicular tissues of the plants. “Ve,” “Xf,” and “If” stand for vessels, xylery fibers, and interfascicular fibers, respectively.

[0070] FIG. 19. Saccharification efficiency of the Eng Lig I and Eng Lig II lines. A. Sugar released from dry stems pretreated with hot water and incubated with a cellulase cocktail for 0 to 144 hrs. Stems are from wild-type (wt; blue) plant, engineered Eng Lig I (orange) plants, or Eng Lig II (red) plants. B. Sugar released from dry stems pretreated with NaOH and incubated with a cellulase cocktail for 0 to 144 hrs. Stems are from wild-type (wt; blue) plant, engineered Eng Lig I (orange) plants, or Eng Lig II (red) plants.

[0071] FIG. 20. Promoter activity characterization. A. Bright-field image of stem cross-section from the base of 5-10 cm stems from wild-type (WT), cadc/d mutant, cadc/d mutant transformed with pVND6:CADc, and cadc/d mutant transformed with pC4H:CADc, from left to right respectively. The redness is generated by the lack of CAD activity. B. Bright-field image from Maule stained stem cross-section from the base of 5-10 cm stems from wild-type (WT), f5h mutant, f5h mutant transformed with pVND6:F5H, and f5h mutant transformed with pC4H:F5H, from left to right respectively. The redness is generated by the presence of Sinapyl alcohol and is representative of the amount of Sinapyl alcohol in the lignin that reacts during the Maule staining reaction. The production of Sinapyl alcohol is restored in the f5h mutant by the expression of the native F5H gene.

[0072] FIG. 21. Xylem collapse. A. Same-age adult ref3-2 mutant (homozygote c4h mutant) and wild-type plants (wt) (right and left, respectively). B. Same vegetative age ref3-2 mutant (homozygote c4h mutant) and wild-type plants (right and left, respectively). C. Top and bottom panels represent a bright-field image of phloroglucinol-stained stem cross-sections, magnified 20 and 40× fold respectively, from wild-type and ref3-2 (left and right respectively) sampled at the same age as presented on A. The yellow arrows point to some collapse vessels in the ref3-2 mutant.

[0073] FIG. 22. Expression analysis of NST1. NST1 expression was analyzed by semi-quantitative RT-PCR. pIRX8:NST1: specific NST1 primers were used to verify the expression of NST1 driven by pIRX8 promoter. NST1: specific NST1 primers were used to verify the expression of both NST1 genes each driven by pIRX8 and pNST1 promoters. pVND6:C4H: specific C4H primers were used to verify the expression of the C4H genes driven by pVND6. C4H: specific C4H primers were used to verify the expression of the C4H genes driven by pVND6 or pC4H promoters (wild-type and ref3-2 mutant alleles). Tubulin: specific tubulin primers was used to verify the quality and quantity of the RNA used for the RT-PCR. Lanes 1 to 4 show independent Eng Lig II (ref3-2+pVND6:C4H+pIRX8:NST1) plants; lane 4 shows a wild-type plant; lanes 5 and 6 show independent Eng Lig I (ref3-2+pVND6:C4H) plants; and lane 7 shows a ref3-2 mutant plant.

[0074] FIG. 23. Cell wall thickness. A-D. Cell wall thickness and cell diameters were measured on 20 independent fiber cells from the intrafascicular regions in Col0 (WT) (A), ref3-2 (c4h mutant) (B), Eng Lig I (C), and Eng Lig II (D) plants. Cell wall ratio was measured by the sum of the cell wall thickness (μm) divided by the cell diameter (μm). E. Cell wall thickness and cell diameter measurement method. The green bar (a) and yellow bar (b) each represent cell wall thickness measurements and the pink bar represents the cell diameter. Cell wall ratio was measured by the sum of the cell wall thickness (μm) divided by the cell diameter (μm), (a+b)/cell diameter.

[0075] FIG. 24. Sugar release from cell wall after chemical hydrolysis. A-B. Hemicellulose composition after TFA hydrolysis. A. Quantification (mg of sugar/mg dry cell wall) of the major sugar released). B. Percentage of each sugar in the total released. C. Total sugar released after H2SO4 hydrolysis.

[0076] FIG. 25. Alignment of SHN protein sequences. The protein sequences for SHN polypeptides from Arabidopsis thaliana (“At”), Populus trichocarpa (“Pt”), Medicago truncatula (“Mt”), Oryza sativa (“Os”), Brachypodium distachyon (“Bd”), Zea mays (“Zm”), Sorghum bicolor (“Sb”), Hordeum vulgare (“Hv”), Picea sitchensis (“Ps”), Selaginella moellendorffi (“Sm”), and Physcomitrella patens (“Pp) were aligned using ClustalW.

[0077] FIG. 26. Alignment of Myb96 protein sequences. The protein sequences for Myb96 polypeptides from Arabidopsis thaliana (“At”), Thellungiella halophila (“Th), Medicago truncatula (“Mt”), Populus trichocarpa (“Pt”), Vitis vinifera (“Vv”), Citrus macrophylla (“Cm”), Brachypodium distachyon (“Bd”), Triticum aestivum (“Ta”), Oryza sativa (“Os”), and Zea Mays (“Zm”) were aligned using ClustalW.

[0078] FIG. 27. Representation of cell wall artificial positive feed back loop. FIG. 27 depicts an illustrative cell wall densification strategy.

[0079] FIG. 28. Induction of wax biosynthetic pathways in target tissues. FIG. 28 depicts an illustrative artificial positive feed back loop to induce a wax biosynthetic pathway in target tissues.

[0080] FIG. 29. Plant growth phenotype of engineered cell wall plant lines. Growth comparison of wildtype, c4h mutant plants and engineered plant lines in which the ref3-2 mutation is complemented with either pREF4::C4H (A) or pRFR1::C4H (B) DNA construct.

[0081] FIG. 30. Lignin distribution and content of engineered cell wall plant lines. Lignin distribution is shown in the upper panel. Lignin quantification is shown in the lower panel.

[0082] FIG. 31. Saccarificaton efficiency of lignin engineered plant lines. Panels A and B show sugar released form dry stems using hot-water (Panel A) or alkali (Panel B) pretreatment follow by incubation was a cellulase cocktail. Panel C provides a summary of the saccharification results.

[0083] FIG. 32. Cell wall densification feed back loop. Panel A illustrates cell wall densification in Arabidopsis wildtype plants containing a DNA construct pCesA4::NST1. Panel B shows cell wall densification in Brachypodium wildtype plants using pAtlRX8::AtNST1 DNA construct where the promoter and transcription factor are both from Arabidopsis.

[0084] FIG. 33. Examples of xylan engineering. Comparison of growth in wildtype, mutant, and mutant plants complemented with the wildtype version of the mutated IRX7, IRX8, or IRX9 gene drive by pVND6 or pVND7.

[0085] FIG. 34. Growth of offspring of transformants. Growth of offspring of four individual transformants made by transforming irx7 mutant with a pVND7::IRX7 expression construct.

[0086] FIG. 35. Growth of offspring of transformants. Growth of offspring of two individual transformants made by transforming irx9 mutant with a pVND7::IRX9 expression construct.

[0087] FIG. 36 Non-cellulosic monosaccharide composition prepared from transformants. Non-cellulosic monosaccharide composition of cell walls prepared from four individual transformants made by transforming irx7 mutant with a pVND7::IRX7 expression construct.

[0088] FIG. 37 Non-cellulosic monosaccharide composition prepared from transformants. Non-cellulosic monosaccharide composition of cell walls prepared from four individual transformants made by transforming irx8 mutant with a pVND6::IRX8 expression construct.

[0089] FIG. 38. Noncellulosic monosaccharide composition of stem cell walls prepared from individual transformants. Non-cellulosic monosaccharide composition of stem cell wall prepared from offspring of four individual transformants made by transforming irx9 mutant with a pVND7::IRX9 expression construct.

[0090] FIG. 39. Saccharification analysis of cells walls. Saccharification analysis of cell walls prepared from offspring of two individual transformants made by transforming irx9 mutant with a pVND6::IRX9 expression construct.

[0091] FIG. 40. Wax deposition in plants transformed to create an artificial positive feedback loop. Visual analysis of the Arabidopsis plant transformed with the different constructs showed increased shininess of the leaves compared with control plants.

### DETAILED DESCRIPTION OF THE INVENTION

### I. Definitions

[0092] As used herein, the term “lignin biosynthesis enzyme” refers to a protein that regulates the synthesis of lignin monomers (p-coumaryl (4-hydroxycinnamyl) alcohol, coniferyl (3-methoxy 4-hydroxycinnamyl) alcohol, and sinapyl (3,5-dimethoxy 4-hydroxycinnamyl) alcohol) in plants. The term includes polymorphic variants, alleles, mutants, and interspecies homologs to the specific enzymes described herein. A nucleic acid that encodes a lignin biosynthesis enzyme refers to a gene, pre-mRNA, mRNA, and the like, including nucleic acids encoding polymorphic variants, alleles, mutants, and interspecies homologs of the particular sequences described herein. Thus, in some embodiments a lignin biosynthesis nucleic acid (1) has a nucleic acid sequence that has greater than about 50% nucleotide sequence identity, 55%, 60%, 65%, 70%, 75%, 80%, 85%, 90%, preferably 91%, 92%, 93%, 94%, 95%, 96%, 97%, 98% or 99% or higher nucleotide sequence identity, preferably over a region of at least about 10, 15, 20, 25, 50, 100, 200, 500 or more nucleotides or over the length of the entire polynucleotide, to a nucleic acid sequence of any of SEQ ID NOs:1, 3, 5, 7, 9, or 11; or (2) encodes a polypeptide having an amino acid sequence that has greater than about 50% amino acid sequence identity, 55%, 60%, 65%, 70%, 75%, 80%, 85%, 90%, preferably 91%, 92%, 93%, 94%, 95%, 96%, 97%, 98% or 99% or greater amino acid sequence identity, preferably over a region of at least about 25, 50, 100, 200 or more amino acids or over the length of the entire polypeptide, to a polypeptide encoded by a nucleic acid sequence of any of SEQ ID NOs:1, 3, 5, 7, 9, or 11 or to an amino acid sequence of any of SEQ ID NOs:2, 4, 6, 8, 10, or 12 or to any one of the sequences shown in any of FIGS. 1-6. In some embodiments, a lignin biosynthesis enzyme, or a lignin biosynthesis polypeptide has an amino acid sequence having greater than about 50% amino acid sequence identity, 55%, 60%, 65%, 70%, 75%, 80%, 85%, 90%, preferably 91%, 92%, 93%, 94%, 95%, 96%, 97%, 98% or 99% or greater amino acid sequence identity, preferably over a region of at least about 25, 50, 100, 200 or more amino acids or over the length of the entire polypeptide, to an amino acid sequence of any of SEQ ID NOs:2, 4, 6, 8, 10, or 12 or to any one of the amino acid sequences shown in any of FIGS. 1-6.

[0093] Lignin biosynthesis enzymes can be identified by name (e.g., cinnamate 4-hydroxylase); gene symbol (e.g., C4H); or accession number (e.g., NM_{—}128601 for nucleic acid or NP_{—}180607 for protein). It is understood that all of these identifiers reference the same biomarker and thus are equivalent. In some embodiments, the lignin biosynthesis enzyme is phenylalanine ammonia lyase (PAL) (accession number NM_{—}129260 or NP_{—}181241), cinnamate 4-hydroxylase (C4H) (accession number NM_{—}128601 or NP_{—}180607), 4-coumarate-CoA ligase (4CL) (accession number NM_{—}113019 or NP_{—}188761), hydroxycinnamoyl CoA:shikimate hydroxycinnamoyl transferase (HCT) (accession number NM_{—}124270 or NP_{—}199704), coumaryol shikimate 3-hydroxylase (C3H) (accession number NM_{—}119566 or NP_{—}850337), or cinnamoyl-CoA reductase 1 (CCR1) (accession number NM_{—}101463 or NP_{—}173047).

[0094] As used herein, the term “xylan biosynthesis enzyme” refers an enzyme that is involved in xylan synthesis. The term as used herein can also relate to an enzyme that modifies xylan, e.g., enzymes that acetylate xylan. The term encompasses polymorphic variants, alleles, mutants, and interspecies homologs to the specific polypeptides described herein. A nucleic acid that encodes a xylan biosynthesis enzyme refers to a gene, pre-mRNA, mRNA, and the like, including nucleic acids encoding polymorphic variants, alleles, mutants, and interspecies homologs of the particular amino acid sequences described herein. Thus, in some embodiments, a xylan biosynthesis enzyme encodes a polypeptide having an amino acid sequence that has greater than about 50% amino acid sequence identity, 55%, 60%, 65%, 70%, 75%, 80%, 85%, 90%, preferably 91%, 92%, 93%, 94%, 95%, 96%, 97%, 98% or 99% or greater amino acid sequence identity, preferably over a region of at least about 25, 50, 100, 200 or more amino acids or over the length of the entire polypeptide, to any one of the amino acid sequences shown in any of FIGS. 7-12. Nucleic acid sequence of examples of xylan biosynthesis enzymes are available under the accession numbers provided in FIGS. 7-12. In some embodiments, a xylan biosynthesis enzyme has an amino acid sequence having greater than about 50% amino acid sequence identity, 55%, 60%, 65%, 70%, 75%, 80%, 85%, 90%, preferably 91%, 92%, 93%, 94%, 95%, 96%, 97%, 98% or 99% or greater amino acid sequence identity, preferably over a region of at least about 25, 50, 100, 200 or more amino acids or over the length of the entire polypeptide, to any one of the amino acid sequences shown in any of FIGS. 7-12. In some embodiments, the xylan biosynthesis enzyme is irregular xylem 8 (IRX8), IRX14, IRX14-like, IRX9, IRX9-like, IRX7, IRX10, IRX10-like, F8H, PARVUS, or RWA1, RWA2, RWA3, or RWA4.

[0095] The term “substantially localized,” when used in the context of describing a plant having lignin deposition and/or xylan deposition that is substantially localized to a particular tissue, refers to lignin deposition and/or xylan deposition that is produced in substantially higher amounts in the particular cell type of interest as compared to other cell types that normally have a high content of lignin and/or xylan, such as interfascicular fibers or phloem fibers. In some embodiments, lignin deposition and/or xylan deposition is substantially localized to a particular cell type of interest when the amount of lignin deposition and/or xylan deposition in the particular cell type of interest is at least 2-fold, 3-fold, 4-fold, 5-fold, 6-fold, 7-fold, 8-fold, 9-fold, 10-fold higher or more as compared to the amount of lignin deposition and/or xylan deposition in other cell types that normally have a high content of lignin and/or xylan. In some embodiments, lignin deposition and/or xylan deposition is substantially localized to a particular cell type of interest when the amount of lignin deposition and/or xylan deposition in the particular cell type of interest is at least 2-fold, 3-fold, 4-fold, 5-fold, 6-fold, 7-fold, 8-fold, 9-fold, 10-fold higher or more as compared to the amount of lignin deposition and/or xylan deposition in interfascicular fibers or phloem fibers. In some embodiments, lignin deposition and/or xylan deposition is substantially localized to a particular cell type of interest when there is no detectable lignin deposition and/or xylan deposition in cell types other than the particular cell type of interest. In some embodiments, xylan O-acetylation is similarly substantially localized to specific cell types, while the content of xylan in general is not necessarily substantially localized in a way different from the natural (i.e., wild-type) situation. Lignin deposition and/or xylan deposition can be assessed using any method known in the art, including but not limited to spectrophotometry using acetyl-bromide reagent, histochemical staining (e.g., with phloroglucinol), and immunohistochemistry (e.g., with LM10 monoclonal antibody). Xylan O-acetylation can be assessed using immunohistochemistry (e.g., with LM23 monoclonal antibody), with biochemical assays for acetyl esters, or by determining the effect of hydrolytic enzymes.

[0096] As used herein, the term “transcription factor that regulates the production of components of a biosynthetic pathway” or “master transcription factor” refers to a transcription factor that regulates expression of one or of multiple genes in a biosynthetic pathway.

[0097] As used herein, the term “transcription factor that regulates the production of secondary cell wall” refers to a polypeptide, and variants, mutants, and homologs of the polypeptide, that regulates the expression of one or more genes involved in lignin biosynthesis and/or polysaccharide (cellulose and hemicellulose) biosynthesis by modulating transcription. In some embodiments, nucleic acids that encodes such a transcription factor: (1) have a nucleic acid sequence that has greater than about 50% nucleotide sequence identity, 55%, 60%, 65%, 70%, 75%, 80%, 85%, 90%, preferably 91%, 92%, 93%, 94%, 95%, 96%, 97%, 98% or 99% or higher nucleotide sequence identity, preferably over a region of at least about 10, 15, 20, 25, 50, 100, 200, 500 or more nucleotides or over the length of the entire polynucleotide, to a nucleic acid sequence of any of SEQ ID NOs:13, 15, 17, 19, 21, 23, 25, 27, 29, 31, or 33; (2) encode a polypeptide having an amino acid sequence that has greater than about 50% amino acid sequence identity, 55%, 60%, 65%, 70%, 75%, 80%, 85%, 90%, preferably 91%, 92%, 93%, 94%, 95%, 96%, 97%, 98% or 99% or greater amino acid sequence identity, preferably over a region of at least about 25, 50, 100, 200 or more amino acids or over the length of the entire polypeptide, to a polypeptide encoded by a nucleic acid sequence of any of SEQ ID NOs:13, 15, 17, 19, 21, 23, 25, 27, 29, 31, or 33 or an amino acid sequence of any of SEQ ID NOs:14, 16, 18, 20, 22, 24, 26, 28, 30, 32, or 34 or to any one of the amino acid sequences shown in FIG. 13. In some embodiments, a transcription factor polypeptide that regulates the production of secondary cell wall: (1) has an amino acid sequence having greater than about 50% amino acid sequence identity, 55%, 60%, 65%, 70%, 75%, 80%, 85%, 90%, preferably 91%, 92%, 93%, 94%, 95%, 96%, 97%, 98% or 99% or greater amino acid sequence identity, preferably over a region of at least about 25, 50, 100, 200 or more amino acids or over the length of the entire polypeptide, to an amino acid sequence of any of SEQ ID NOs:14, 16, 18, 20, 22, 24, 26, 28, 30, 32, or 34 or to any one of the amino acid sequences shown in FIG. 13.

[0098] In some embodiments, the transcription factor is NAC secondary wall-thickening promoting factor 1 (NST1) (ANAC043; accession number NM_{—}130243 or NP_{—}182200), NST2 (ANAC066; accession number NM_{—}116056 or NP_{—}191750), NST3 (SND1/ANAC012; accession number NM_{—}103011 or NP_{—}174554), secondary wall-associated NAC domain protein 2 (SND2) (ANAC073; accession number NM_{—}118992 or NP_{—}194579), SND3 (ANAC010; accession number NM_{—}102615 or NP_{—}564309), MYB domain protein 103 (MYB103) (accession number NM_{—}105065 or NP_{—}176575), MBY85 (accession number NM_{—}118394 or NP_{—}567664), MYB46 (accession number NM_{—}121290 or NP_{—}196791), MYB83 (accession number NM_{—}111685 or NP_{—}187463), MYB58 (accession number NM_{—}101514 or NP_{—}173098), or MYB63 (accession number NM_{—}106569 or NP_{—}178039).

[0099] The term “downstream target,” when used in the context of a downstream target of a transcription factor that regulates a component of a biosynthetic pathway of interest refers to a gene or protein whose expression is directly or indirectly regulated by the transcription factor. In some embodiments, the downstream target is a gene or protein that is directly or indirectly upregulated by the transcription factor. In some embodiments, the downstream target is a gene or protein that is directly or indirectly downregulated by the transcription factor.

[0100] In the context of secondary wall production, a downstream target can be, for example, IRX1, IRX3, IRX5, IRX8, IRX9, IRX14, IRX14-L, IRX7, or IRX10. See, for example, FIGS. 7-12 for examples of accession numbers and sequences for downstream targets. Downstream target genes are also described in the art; see, for example, Oikawa et al., 2010, PLoS ONE 5(11):e15481. As understood in the art, and further explained hereinbelow, some of the downstream targets (e.g., IRX9-Like and RWA2) may not be expressed in secondary wall tissue per se, but can be linked to a secondary wall-specific promoter or a vessel-specific promoter that is regulated by a transcription factor that regulates secondary wall production and can then serve to substantially localize xylan or xylan acetylation to the secondary wall.

[0101] As used herein, the term transcription factor that regulates the production “wax and/or cutin” components (e.g., wax ester, alkane, fatty alcohol and fatty esters) refers to a polypeptide, and variants, mutants, and homologs of the polypeptide, that regulates the expression of one or more genes involved in wax and/or cutin biosynthesis by modulating transcription. In some embodiments, nucleic acids that encodes such a transcription factor: encode a polypeptide having an amino acid sequence that has greater than about 50% amino acid sequence identity, 55%, 60%, 65%, 70%, 75%, 80%, 85%, 90%, preferably 91%, 92%, 93%, 94%, 95%, 96%, 97%, 98% or 99% or greater amino acid sequence identity, preferably over a region of at least about 25, 50, 100, 200 or more amino acids or over the length of the entire polypeptide, to a polypeptide encoded by a nucleic acid sequence of any one of SEQ ID NOs:80-93, or an amino acid sequence of any of any one of SEQ ID NOs:80-93.

[0102] When used in the context of a transcription factor that regulates wax/cutin production, “downstream target” refers to a non-coding RNA, gene, or protein involved in wax/cutin production whose expression is directly or indirectly regulated by the transcription factor. In some embodiments, the downstream target is a non-coding RNA, gene, or protein that is directly or indirectly upregulated by the transcription factor. In some embodiments, the downstream target is a non-coding RNA, gene, or protein that is directly or indirectly downregulated by the transcription factor. Examples of such genes include the following (synonyms for the gene are listed in parenthesis): CER1, aldehyde decarbonylase; CER2 (VC2), BAHD-type acyl-transferase; CER3 (WAX2), sterol desaturase; CER4 (FAR3), fatty acyl-CoA reductase; CER5 (WBC12), ABC transporter; CER6 (CUT1), very long chain fatty acid condensing enzyme; CER10 (ECR), enoyl-CoA reductase; WSD1, wax ester synthase; MAH1, mid-chain alkane hydrolase; WBC11 (ABCG11, DSO, COF1), ABC transporter; KCS1, very long chain fatty acid condensing enzyme; KCS2 (DAISY), very long chain fatty acid condensing enzyme; FATB, acyl carrier; LACS1, long chain acyl-CoA synthase; LACS2, long chain acyl-CoA synthase; CYP86A4, cytochrome P450-dependent fatty acid hydroxylase; CYP86A7, cytochrome P450-dependent fatty acid hydroxylase; LCR (CYP86A5), cytochrome P450-dependent fatty acid hydroxylase; KCS10 (FDH), very long chain fatty acid condensing enzyme; and CER60 (KCS5), very long chain fatty acid condensing enzyme. Examples of accession numbers are provided in the Listing of Illustrative Wax/Cutin genes.

[0103] The terms “reduced level of activity,” “reduced activity” and “decreased activity” refer interchangeably to a reduction in the amount of activity of a protein, e.g., a cell wall biosynthesis enzyme of interest or a xylan biosynthesis enzyme gene or protein of interest in an engineered plant as compared to the amount of activity in a wild-type (i.e., naturally occurring) plant. In some embodiments, reduced activity results from reduces expression levels. A reduced level of activity or a reduces level of expression can be a reduction in the amount of activity or expression of a protein, e.g., a cell wall biosynthesis enzyme gene or protein or a xylan biosynthesis enzyme gene or protein, of at least 10%, 20%, 30%, 40%, 50%, 60%, 70%, 80%, or 90% or greater. In some embodiments, the reduced level of activity or reduced level of expression is a reduction in the amount of activity or expression of the enzyme, e.g., a cell wall biosynthesis enzyme gene or protein of interest or a xylan biosynthesis enzyme gene or protein of interest, throughout all the tissues of the engineered plant. In some embodiments, the reduction in the amount of activity or expression of the protein or gene, e.g., a cell wall biosynthesis enzyme gene or protein of interest or a xylan biosynthesis enzyme gene or protein of interest, is localized to one or more tissues of the engineered plant. In some embodiments, the biosynthetic enzyme is not reduced in amount but is modified in amino acid sequence so that the enzymatic activity is reduced directly or indirectly (e.g., expression of inhibitory protein). Reduction in the amount of expression of a gene or protein can be assessed by measuring decreases in the level of RNA encoded by the gene of interest and/or decreases in the level of protein expression or activity for the protein of interest.

[0104] The terms “polynucleotide” and “nucleic acid” are used interchangeably and refer to a single or double-stranded polymer of deoxyribonucleotide or ribonucleotide bases read from the 5′ to the 3′ end. A nucleic acid of the present invention will generally contain phosphodiester bonds, although in some cases, nucleic acid analogs may be used that may have alternate backbones, comprising, e.g., phosphoramidate, phosphorothioate, phosphorodithioate, or O-methylphosphoroamidite linkages (see Eckstein, Oligonucleotides and Analogues: A Practical Approach, Oxford University Press); positive backbones; non-ionic backbones, and non-ribose backbones. Thus, nucleic acids or polynucleotides may also include modified nucleotides that permit correct read-through by a polymerase. “Polynucleotide sequence” or “nucleic acid sequence” includes both the sense and antisense strands of a nucleic acid as either individual single strands or in a duplex. As will be appreciated by those in the art, the depiction of a single strand also defines the sequence of the complementary strand; thus the sequences described herein also provide the complement of the sequence. Unless otherwise indicated, a particular nucleic acid sequence also implicitly encompasses variants thereof (e.g., degenerate codon substitutions) and complementary sequences, as well as the sequence explicitly indicated. The nucleic acid may be DNA, both genomic and cDNA, RNA or a hybrid, where the nucleic acid may contain combinations of deoxyribo- and ribo-nucleotides, and combinations of bases, including uracil, adenine, thymine, cytosine, guanine, inosine, xanthine hypoxanthine, isocytosine, isoguanine, etc.

[0105] The term “substantially identical,” used in the context of two nucleic acids or polypeptides, refers to a sequence that has at least 50% sequence identity with a reference sequence. Percent identity can be any integer from 50% to 100%. Some embodiments include at least: 50%, 55%, 60%, 65%, 70%, 75%, 80%, 85%, 90%, 91%, 92%, 93%, 94%, 95%, 96%, 97%, 98%, or 99%, compared to a reference sequence using the programs described herein; preferably BLAST using standard parameters, as described below. For example, a polynucleotide encoding a lignin biosynthesis enzyme may have a sequence that is at least 50%, 55%, 60%, 65%, 70%, 75%, 80%, 85%, 90%, 91%, 92%, 93%, 94%, 95%, 96%, 97%, 98%, or 99% identical to a sequence of SEQ ID NO:1, SEQ ID NO:3, SEQ ID NO:5, SEQ ID NO:7, SEQ ID NO:9, or SEQ ID NO:11.

[0106] Two nucleic acid sequences or polypeptide sequences are said to be “identical” if the sequence of nucleotides or amino acid residues, respectively, in the two sequences is the same when aligned for maximum correspondence as described below. The terms “identical” or percent “identity,” in the context of two or more nucleic acids or polypeptide sequences, refer to two or more sequences or subsequences that are the same or have a specified percentage of amino acid residues or nucleotides that are the same, when compared and aligned for maximum correspondence over a comparison window, as measured using one of the following sequence comparison algorithms or by manual alignment and visual inspection. When percentage of sequence identity is used in reference to proteins or peptides, it is recognized that residue positions that are not identical often differ by conservative amino acid substitutions, where amino acids residues are substituted for other amino acid residues with similar chemical properties (e.g., charge or hydrophobicity) and therefore do not change the functional properties of the molecule. Where sequences differ in conservative substitutions, the percent sequence identity may be adjusted upwards to correct for the conservative nature of the substitution. Means for making this adjustment are well known to those of skill in the art. Typically this involves scoring a conservative substitution as a partial rather than a full mismatch, thereby increasing the percentage sequence identity. Thus, for example, where an identical amino acid is given a score of 1 and a non-conservative substitution is given a score of zero, a conservative substitution is given a score between zero and 1. The scoring of conservative substitutions is calculated according to, e.g., the algorithm of Meyers & Miller, Computer Applic. Biol. Sci. 4:11-17 (1988) e.g., as implemented in the program PC/GENE (Intelligenetics, Mountain View, Calif., USA).

[0107] For sequence comparison, typically one sequence acts as a reference sequence, to which test sequences are compared. When using a sequence comparison algorithm, test and reference sequences are entered into a computer, subsequence coordinates are designated, if necessary, and sequence algorithm program parameters are designated. Default program parameters can be used, or alternative parameters can be designated. The sequence comparison algorithm then calculates the percent sequence identities for the test sequences relative to the reference sequence, based on the program parameters.

[0108] A “comparison window,” as used herein, includes reference to a segment of any one of the number of contiguous positions selected from the group consisting of from 20 to 600, usually about 50 to about 200, more usually about 100 to about 150 in which a sequence may be compared to a reference sequence of the same number of contiguous positions after the two sequences are optimally aligned. Methods of alignment of sequences for comparison are well-known in the art. Optimal alignment of sequences for comparison can be conducted, e.g., by the local homology algorithm of Smith & Waterman, Adv. Appl. Math. 2:482 (1981), by the homology alignment algorithm of Needleman & Wunsch, J. Mol. Biol. 48:443 (1970), by the search for similarity method of Pearson & Lipman, Proc. Nat'l. Acad. Sci. USA 85:2444 (1988), by computerized implementations of these algorithms (GAP, BESTFIT, FASTA, and TFASTA in the Wisconsin Genetics Software Package, Genetics Computer Group, 575 Science Dr., Madison, Wis.), or by manual alignment and visual inspection.

[0109] Algorithms that are suitable for determining percent sequence identity and sequence similarity are the BLAST and BLAST 2.0 algorithms, which are described in Altschul et al. (1990) J. Mol. Biol. 215: 403-410 and Altschul et al. (1977) Nucleic Acids Res. 25: 3389-3402, respectively. Software for performing BLAST analyses is publicly available through the National Center for Biotechnology Information (NCBI) web site. The algorithm involves first identifying high scoring sequence pairs (HSPs) by identifying short words of length W in the query sequence, which either match or satisfy some positive-valued threshold score T when aligned with a word of the same length in a database sequence. T is referred to as the neighborhood word score threshold (Altschul et al, supra). These initial neighborhood word hits acts as seeds for initiating searches to find longer HSPs containing them. The word hits are then extended in both directions along each sequence for as far as the cumulative alignment score can be increased. Cumulative scores are calculated using, for nucleotide sequences, the parameters M (reward score for a pair of matching residues; always >0) and N (penalty score for mismatching residues; always <0). For amino acid sequences, a scoring matrix is used to calculate the cumulative score. Extension of the word hits in each direction are halted when: the cumulative alignment score falls off by the quantity X from its maximum achieved value; the cumulative score goes to zero or below, due to the accumulation of one or more negative-scoring residue alignments; or the end of either sequence is reached. The BLAST algorithm parameters W, T, and X determine the sensitivity and speed of the alignment. The BLASTN program (for nucleotide sequences) uses as defaults a word size (W) of 28, an expectation (E) of 10, M=1, N=−2, and a comparison of both strands. For amino acid sequences, the BLASTP program uses as defaults a word size (W) of 3, an expectation (E) of 10, and the BLOSUM62 scoring matrix (see Henikoff & Henikoff, Proc. Natl. Acad. Sci. USA 89:10915 (1989)).

[0110] The BLAST algorithm also performs a statistical analysis of the similarity between two sequences (see, e.g., Karlin & Altschul, Proc. Nat'l. Acad. Sci. USA 90:5873-5787 (1993)). One measure of similarity provided by the BLAST algorithm is the smallest sum probability (P(N)), which provides an indication of the probability by which a match between two nucleotide or amino acid sequences would occur by chance. For example, a nucleic acid is considered similar to a reference sequence if the smallest sum probability in a comparison of the test nucleic acid to the reference nucleic acid is less than about 0.01, more preferably less than about 10⁻⁵, and most preferably less than about 10⁻²⁰.

[0111] Nucleic acid or protein sequences that are substantially identical to a reference sequence include “conservatively modified variants.” With respect to particular nucleic acid sequences, conservatively modified variants refers to those nucleic acids which encode identical or essentially identical amino acid sequences, or where the nucleic acid does not encode an amino acid sequence, to essentially identical sequences. Because of the degeneracy of the genetic code, a large number of functionally identical nucleic acids encode any given protein. For instance, the codons GCA, GCC, GCG and GCU all encode the amino acid alanine. Thus, at every position where an alanine is specified by a codon, the codon can be altered to any of the corresponding codons described without altering the encoded polypeptide. Such nucleic acid variations are “silent variations,” which are one species of conservatively modified variations. Every nucleic acid sequence herein which encodes a polypeptide also describes every possible silent variation of the nucleic acid. One of skill will recognize that each codon in a nucleic acid (except AUG, which is ordinarily the only codon for methionine) can be modified to yield a functionally identical molecule. Accordingly, each silent variation of a nucleic acid which encodes a polypeptide is implicit in each described sequence.

[0112] As to amino acid sequences, one of skill will recognize that individual substitutions, in a nucleic acid, peptide, polypeptide, or protein sequence which alters a single amino acid or a small percentage of amino acids in the encoded sequence is a “conservatively modified variant” where the alteration results in the substitution of an amino acid with a chemically similar amino acid. Conservative substitution tables providing functionally similar amino acids are well known in the art.

[0113] The following six groups each contain amino acids that are conservative substitutions for one another:

### 1) Alanine (A), Serine (S), Threonine (T);

[0114] 2) Aspartic acid (D), Glutamic acid (E);

### 3) Asparagine (N), Glutamine (Q);

### 4) Arginine (R), Lysine (K);

### 5) Isoleucine (I), Leucine (L), Methionine (M), Valine (V); and

### 6) Phenylalanine (F), Tyrosine (Y), Tryptophan (W).

[0115] (see, e.g., Creighton, Proteins (1984)).

[0116] Another indication that nucleotide sequences are substantially identical is if two molecules hybridize to each other, or a third nucleic acid, under stringent conditions. Stringent conditions are sequence dependent and will be different in different circumstances. Generally, stringent conditions are selected to be about 5° C. lower than the thermal melting point (Tm) for the specific sequence at a defined ionic strength and pH. The Tm is the temperature (under defined ionic strength and pH) at which 50% of the target sequence hybridizes to a perfectly matched probe. Typically, stringent conditions will be those in which the salt concentration is about 0.02 molar at pH 7 and the temperature is at least about 60° C. For example, stringent conditions for hybridization, such as RNA-DNA hybridizations in a blotting technique are those which include at least one wash in 0.2×SSC at 55° C. for 20 minutes, or equivalent conditions.

[0117] The term “promoter,” as used herein, refers to a polynucleotide sequence capable of driving transcription of a DNA sequence in a cell. Thus, promoters used in the polynucleotide constructs of the invention include cis- and trans-acting transcriptional control elements and regulatory sequences that are involved in regulating or modulating the timing and/or rate of transcription of a gene. For example, a promoter can be a cis-acting transcriptional control element, including an enhancer, a promoter, a transcription terminator, an origin of replication, a chromosomal integration sequence, 5′ and 3′ untranslated regions, or an intronic sequence, which are involved in transcriptional regulation. These cis-acting sequences typically interact with proteins or other biomolecules to carry out (turn on/off, regulate, modulate, etc.) gene transcription. Promoters are located 5′ to the transcribed gene, and as used herein, include the sequence 5′ from the translation start codon (i.e., including the 5′ untranslated region of the mRNA, typically comprising 100-200 bp). Most often the core promoter sequences lie within 1-2 kb of the translation start site, more often within 1 kbp and often within 500 bp of the translation start site. By convention, the promoter sequence is usually provided as the sequence on the coding strand of the gene it controls. In the context of this application, a promoter is typically referred to by the name of the gene for which it naturally regulates expression. A promoter used in an expression construct of the invention is referred to by the name of the gene. Reference to a promoter by name includes a wildtype, native promoter as well as variants of the promoter that retain the ability to induce expression. Reference to a promoter by name is not restricted to a particular plants species, but also encompasses a promoter from a corresponding gene in other plant species.

[0118] A “constitutive promoter” in the context of this invention refers to a promoter that is capable of initiating transcription in nearly all cell types, whereas a “cell type-specific promoter” or “tissue-specific promoter” initiates transcription only in one or a few particular cell types or groups of cells forming a tissue. In some embodiments, a promoter is tissue-specific if the transcription levels initiated by the promoter in a particular cell-type or tissue are at least 2-fold, 3-fold, 4-fold, 5-fold, 6-fold, 7-fold, 8-fold, 9-fold, 10-fold, 50-fold, 100-fold, 500-fold, 1000-fold higher or more as compared to the transcription levels initiated by the promoter in non-vessel tissues. In some embodiments, the promoter is vessel-specific. As used herein, a “vessel-specific” promoter refers to a promoter that initiates substantially higher levels of transcription in vessels as compared to other non-vessel cells of the plant. As used herein, the term “vessel” refers to xylem vessels, a conductive component of the vascular tissues in plants that function in the transport of water, nutrients, and signaling molecules throughout the plant. In some embodiments, a promoter is vessel-specific if the transcription levels initiated by the promoter in vessel tissues are at least 2-fold, 3-fold, 4-fold, 5-fold, 6-fold, 7-fold, 8-fold, 9-fold, 10-fold, 50-fold, 100-fold, 500-fold, 1000-fold higher or more as compared to the transcription levels initiated by the promoter in non-vessel tissues. Non-limiting examples of vessel-specific promoters include the native promoter of any of the genes encoding Vascular-Related NAC-Domain Protein 1 (VND1), VND2, VND3, VND4, VND5, VND6, VND7. See, e.g., Kubo et al., Genes Dev. 19:1855-1860 (2005), which is incorporated by reference herein. Another example of a vessel-specific promoter includes the native promoter of REF4 and RFR1 (see, e.g., Bonawitz et al., “The REF4 and RFR1 subunits of the eukaryotic transcriptional coregulatory complex Mediator are required for phenylpropanoid homeostasis in Arabidopsis.” doi:10.1074/jbc.M111.312298 (2012)).

[0119] In the context of an artificial positive feedback loop, an “induced” promoter from a downstream gene in a biosynthetic pathway of interest refers to a promoter where expression of the gene is enhanced, i.e., expression may be directly or indirectly activated (turned on and/or increased) by the transcription factor employed in the artificial positive feedback loop. Thus, in when referring to a promoter employed in an artificial feedback loop construct, it is understood that the promoter is “induced” by the transcription factor regardless of whether it is explicitly stated that the promoter is an induced promoter.

[0120] A polynucleotide is “heterologous” to an organism or a second polynucleotide sequence if it originates from a foreign species, or, if from the same species, is modified from its original form. For example, when a polynucleotide encoding a polypeptide sequence is said to be operably linked to a heterologous promoter, it means that the polynucleotide coding sequence encoding the polypeptide is derived from one species whereas the promoter sequence is derived from another, different species; or, if both are derived from the same species, the coding sequence is not naturally associated with the promoter (e.g., is a genetically engineered coding sequence, e.g., from a different gene in the same species, or an allele from a different ecotype or variety).

[0121] The term “operably linked” refers to a functional relationship between two or more polynucleotide (e.g., DNA) segments. Typically, it refers to the functional relationship of a transcriptional regulatory sequence to a transcribed sequence. For example, a promoter or enhancer sequence is operably linked to a DNA or RNA sequence if it stimulates or modulates the transcription of the DNA or RNA sequence in an appropriate host cell or other expression system. Generally, promoter transcriptional regulatory sequences that are operably linked to a transcribed sequence are physically contiguous to the transcribed sequence, i.e., they are cis-acting. However, some transcriptional regulatory sequences, such as enhancers, need not be physically contiguous or located in close proximity to the coding sequences whose transcription they enhance.

[0122] The term “expression cassette” or “DNA construct” or “expression construct” refers to a nucleic acid construct that, when introduced into a host cell, results in transcription and/or translation of an RNA or polypeptide, respectively. Antisense or sense constructs that are not or cannot be translated are expressly included by this definition. In the case of both expression of transgenes and suppression of endogenous genes (e.g., by antisense, RNAi, or sense suppression) one of skill will recognize that the inserted polynucleotide sequence need not be identical, but may be only substantially identical to a sequence of the gene from which it was derived. As explained herein, these substantially identical variants are specifically covered by reference to a specific nucleic acid sequence. One example of an expression cassette is a polynucleotide construct that comprises a transcription factor operably linked to a heterologous promoter that is a promoter from a gene that is regulated by the transcription factor.

[0123] The term “plant” as used herein can refer to a whole plant or part of a plant, e.g., seeds, and includes plants of a variety of ploidy levels, including aneuploid, polyploid, diploid and haploid. The term “plant part,” as used herein, refers to shoot vegetative organs and/or structures (e.g., leaves, stems and tubers), branches, roots, flowers and floral organs (e.g., bracts, sepals, petals, stamens, carpels, anthers), ovules (including egg and central cells), seed (including zygote, embryo, endosperm, and seed coat), fruit (e.g., the mature ovary), seedlings, and plant tissue (e.g., vascular tissue, ground tissue, and the like), as well as individual plant cells, groups of plant cells (e.g., cultured plant cells), protoplasts, plant extracts, and seeds. The class of plants that can be used in the methods of the invention is generally as broad as the class of higher and lower plants amenable to transformation techniques, including angiosperms (monocotyledonous and dicotyledonous plants), gymnosperms, ferns, bryophytes, and multicellular algae.

[0124] The term “biomass,” as used herein, refers to plant material that is processed to provide a product, e.g., a biofuel such as ethanol, or livestock feed, or a cellulose for paper and pulp industry products. Such plant material can include whole plants, or parts of plants, e.g., stems, leaves, branches, shoots, roots, tubers, and the like.

[0125] The term “increased secondary cell wall deposition” refers to an increased amount of secondary cell wall that is produced in an engineered plant of the present invention as compared to a wild-type (i.e., naturally occurring) plant, e.g., an increased density or thickness and/or an increased ratio between the cell diameter and cell wall thicknesses. “Secondary cell wall” is mainly composed of cellulose, hemicellulose, and lignin and is deposited in some, but not all, tissues of a plant, such woody tissue. Secondary cell wall deposition is said to be increased in an engineered plant as compared to a wild-type plant when the amount of one or more components of secondary cell wall (e.g., cellulose, hemicellulose, or lignin) in the engineered plant, or the ratio between the cell diameter and cell wall thickness, is increased by at least 10%, at least 20, 30%, 40%, 50%, 60%, 70%, 80%, 90% or more relative to the amount of the one or more components of secondary cell wall in a wild-type plant. The amount of a component of secondary cell wall that is present can be assessed using any method known in the art, including but not limited to microscopy (e.g., electron-microscopy, RAMAN-microscopy), histochemical staining (e.g., phloroglucinol) and enzymatic or chemical reaction (e.g., polysaccharide hydrolysis or TFA hydrolysis).

[0126] The term “saccharification reaction” refers to a process of converting biomass, usually cellulosic or lignocellulosic biomass, into monomeric sugars, such as glucose and xylose.

[0127] The term “soluble sugar” refers to monomeric, dimeric, or trimeric sugar that is produced from the saccharification of biomass.

[0128] The term “increased amount,” when referring to an amount of sugar or soluble sugar obtained from an engineered plant of the present invention, refers to an increase in the amount or yield of sugar that is obtained from saccharification of biomass per amount of starting material, in comparison to corresponding biomass from a wild-type (i.e., naturally occurring) plant. In the context of the present invention, “corresponding biomass from a wild-type plant” refers to plant material that is from the same part of the plant as the biomass from a plant having a reduced level of expression of a lignin biosynthesis enzyme and/or xylan biosynthesis enzyme. As understood in the art, increased amount or increased yield is based upon comparisons of the same amount of corresponding plant material.

[0129] The term “conversion reaction,” as used herein, refers to a reaction that converts biomass into a form of bioenergy. Examples of conversion reactions include, but are not limited to, combustion (burning), gasification, pyrolysis, and polysaccharide hydrolysis (enzymatic or chemical).

[0130] The term “increased production,” when referring to an amount of bioenergy production obtained from an engineered plant of the present invention, refers to an increased amount of bioenergy that is produced from subjecting biomass from an engineered plant to a conversion reaction (e.g., combustion, gasification, pyrolysis, or polysaccharide hydrolysis) as compared to the amount of bioenergy that is produced from corresponding biomass from a wild-type (i.e., naturally occurring) plant.

### II. Introduction

[0131] In one aspect, the present invention relates to the discovery that an artificial positive feedback loop (APFL) can be created in plants to regulate gene expression in desired biosynthetic pathways, for example, to modulate gene expression in one or more desired tissues. Accordingly, the invention provides an APFL in plants wherein the APFL comprises a gene encoding a transcription factor that controls expression of a biosynthetic pathway of interest operably linked to a promoter from an induced downstream gene in the biosynthetic pathway where the expression of the downstream gene is controlled by the transcription factor. Examples of biosynthetic pathways that can be regulated by such a system include secondary cell wall deposition, wax/cutin biosynthesis, lipid biosynthesis, alkaloid biosynthesis and terpenoid biosynthesis. Thus, one example of an APFL in accordance with the invention relates to increasing cell wall deposition in specific tissues whereby a nucleic acid encoding a transcription factor as described herein that controls the biosynthesis of secondary cell wall is operably linked to a promoter from a downstream induced gene involved in secondary wall biosynthesis where expression of the downstream gene is induced by the transcription factor. A second example of an APFL of the invention comprises a nucleic acid encoding a transcription factor as described herein that controls expression of wax and/or cutin biosynthesis operably linked to a promoter from a downstream induced gene involved in wax and/or cutin biosynthesis where expression of the downstream gene is induced by the transcription factor. A further example of an APFL of the invention comprises a nucleic acid encoding a transcription factor as described herein that regulates lipid biosynthesis and, e.g., accumulation in seed and other tissues, operably linked to a promoter from a downstream induced gene involved in lipid biosynthesis where expression of the downstream gene is induced by the transcription factor.

[0132] In various embodiments, the invention provides nucleic acids, expression constructions, and plants comprising AFPLs of the invention and methods of using such compositions.

[0133] In one aspect, the present invention is based, in part, on the discovery that focusing lignin deposition in the vessels of plants while reducing lignin and/or xylan content elsewhere in the plant overcomes problems typically associated with plants having reduced lignin or xylan content, specifically vessel collapse and stunting of plant development. Although cell wall components such as lignin and xylan are beneficial to plants for purposes such as providing structural support to the vessels which supply water and nutrients throughout the plant, these cell wall components (e.g., lignin and xylan) also account for much of the recalcitrance of cell walls to enzymatic degradation and polysaccharide extractability. Therefore, specific localization of lignin and xylan in vessels represents a method by which the cell walls of plants can be made more susceptible to enzymatic degradation and polysaccharide extractability, thus improving saccharification and, e.g., biofuel production from plants; and also providing for improved substrates for the paper and pulp industry.

[0134] Accordingly, in one aspect the present invention provides methods of engineering a plant having lignin and/or xylan deposition and/or xylan O-acetylation that is substantially localized to the vessels of xylem tissue of the plant. Vessel-specific lignin and/or xylan deposition and/or xylan O-acetylation is accomplished by reducing a lignin and/or xylan biosynthesis enzyme and/or xylan O-acetylation enzyme and expressing a substantially identical enzyme (e.g., an ortholog or a paralog of the enzyme reduced in the plant, or an enzyme that has the same biochemical function) under the control of a vessel-specific promoter that is not the native promoter of the lignin and/or xylan biosynthesis enzyme and/or xylan O-acetylation enzyme. Plants of the present invention or biomass comprising the plants of the present invention are suitable for use in a saccharification reaction to obtain an increased amount of soluble sugars than can be obtained from wild-type plants, or in the paper industry.

[0135] The present invention is also based, in part, on the discovery that increasing cell wall deposition specifically in woody tissues results in plants having cells that are filled with cell wall polymers. Increased cell wall deposition is beneficial because it increases the biomass density of the plant, which in turn can increase the amount of bioenergy production that can be obtained from the plant. Accordingly, in another aspect the present invention provides methods of engineering a plant having increased cell wall deposition using an AFPL. A transcription factor that regulates secondary cell wall production is expressed in a plant under the control of a promoter from an induced gene that is a downstream target of the transcription factor. The expression of the transcription factor increases the expression driven from the downstream promoter, which in turn, because it is operably linked to a gene encoding the transcription factor, increases the expression of the transcription factor, thus generating a positive feedback loop that enhances the expression of the downstream genes of the secondary cell wall pathway and consequently increases secondary cell wall deposition. The transcription factor and promoter may both be from a different plant species that the host plant, or either the transcription factor or promoter may be from a different plant species. Similarly, the transcription factor and promoter need not be from the same plant species. Plants of the present invention or biomass comprising the plants of the present invention are suitable for use in a biomass conversion reaction to increase bioenergy production as compared to the bioenergy production of wild-type plants.

[0136] The methods of the present invention can further be used in combination with one another. Thus, in some embodiments, the present invention provides methods of making plants having increased lignin deposition that is substantially localized to the vessels of xylem tissue of the plant and having increased secondary cell wall deposition. In some embodiments, the present invention provides methods of making plants having increased xylan deposition that is substantially localized to the vessels of xylem tissue of the plant and having increased secondary cell wall deposition. In some embodiments, the present invention provides methods of making plants having increased xylan O-acetylation deposition that is substantially localized to the vessels of xylem tissue of the plant and having increased secondary cell wall deposition. In some embodiments, the present invention provides methods of making plants having increased lignin deposition that is substantially localized to the vessels of xylem tissue of the plant and having increased xylan deposition that is substantially localized to the vessels of xylem tissue of the plant. In some embodiments, the present invention provides methods of making plants having lignin deposition that is substantially localized to the vessels of xylem tissue of the plant and having increased xylan O-acetylation deposition that is substantially localized to the vessels of xylem tissue of the plant.

[0137] In another aspect, the invention provides a method of increasing wax/cutin production in a desired tissue. A transcription factor that regulates wax/cuticle production is expressed in a plant under the control of a promoter from an induced gene that is a downstream target of the transcription factor. The expression of the transcription factor increases the expression driven by the downstream promoter, which in turn, because it is operably linked to a gene encoding the transcription factor, increases the expression of the transcription factor, thus generating a positive feedback loop that increases wax/cutin production. The transcription factor and promoter, or the transcription factor or promoter, can be from a different species than the host plant cell in which the artificial positive feedback loop is created. In some embodiments, the transcription factor and promoter are from different species. Plants generated in accordance with this aspect of the invention have increased drought tolerance and reduced water consumption.

### III. Plants Having Spatially Modified Gene Expression

[0138] A. Modification of Expression of a Lignin or Xylan Biosynthesis Enzyme

[0139] In one aspect, the present invention provides methods of engineering a plant having lignin deposition that is substantially localized to the vessels of xylem tissue of the plant. In some embodiments, the method comprises:
[0140] introducing an expression cassette into the plant, wherein the plant is modified to have a reduced level of expression of a lignin biosynthesis enzyme; and wherein the expression cassette comprises a polynucleotide encoding the lignin biosynthesis enzyme operably linked to a heterologous vessel-specific promoter; and
[0141] culturing the plant under conditions in which the lignin biosynthesis enzyme is expressed.

[0142] In another aspect, the present invention provides methods of engineering a plant having xylan deposition that is substantially localized to the vessels of xylem tissue of the plant. In some embodiments, the method comprises:
[0143] introducing an expression cassette into the plant, wherein the plant is modified to have a reduced level of expression of a xylan biosynthesis enzyme; and wherein the expression cassette comprises a polynucleotide encoding the xylan biosynthesis enzyme operably linked to a heterologous vessel-specific promoter; and
[0144] culturing the plant under conditions in which the xylan biosynthesis enzyme is expressed.

[0145] The expression cassette as described herein, when introduced into a plant that is modified to have a reduced level of expression of the lignin or xylan biosynthesis enzyme, results in a plant having fine-tuned lignin or xylan deposition in which lignin is still expressed in vessel tissues, thus preventing vessel collapse, but in which lignin or xylan is not highly expressed in other tissues, thus reducing cell wall recalcitrance.

[0146] One of skill in the art will understand that the lignin biosynthesis enzyme and/or xylan biosynthesis enzyme that is introduced into the plant by an expression cassette does not have to be identical to the lignin biosynthesis enzyme and/or xylan biosynthesis enzyme that was modified in the plant before introduction of the expression cassette. In some embodiments, the lignin biosynthesis enzyme and/or xylan biosynthesis enzyme that is introduced into the plant by an expression cassette is substantially identical (e.g., at least 50%, at least 55%, at least 60%, at least 65%, at least 70%, at least 75%, at least 80%, at least 85%, at least 90%, at least 91%, at least 92%, at least 93%, at least 94%, at least 95%, at least 96%, at least 97%, at least 98%, or at least 99% identical) to the lignin biosynthesis enzyme and/or xylan biosynthesis enzyme that was modified in the plant before introduction of the expression cassette. In some embodiments, the lignin biosynthesis enzyme and/or xylan biosynthesis enzyme that is introduced into the plant by an expression cassette is a homolog (e.g., a homolog as shown in any of the alignments of FIGS. 1-12 or an enzyme with the same biochemical function, e.g., paralog) of the lignin biosynthesis enzyme and/or xylan biosynthesis enzyme that was modified in the plant before introduction of the expression cassette.

[0147] 1. Lignin Biosynthesis Enzymes

[0148] In some embodiments, the expression cassette comprises a polynucleotide encoding a lignin biosynthesis enzyme. A lignin biosynthesis enzyme may be selected for use in the present invention on the basis that regulates the production of monolignols and therefore lignin biosynthesis. In some embodiments, the lignin biosynthesis enzyme is phenylalanine ammonia lyase (PAL), cinnamate 4-hydroxylase (C4H), 4-coumarate-CoA ligase (4CL), hydroxycinnamoyl CoA:shikimate hydroxycinnamoyl transferase (HCT), coumaryol shikimate 3-hydroxylase (C3H), or cinnamoyl-CoA reductase 1 (CCR1).

[0149] The lignin biosynthesis enzymes PAL, C4H, 4CL, HCT, C3H, and CCR1 have been characterized in Arabidopsis and have been shown to mediate the synthesis of lignin monomers (monolignols) from phenylalanine. See, e.g., Bonawitz and Chapple, Annu. Rev. Genet. 44:337-63 (2010). Thus, in some embodiments, the polynucleotide encoding a lignin biosynthesis enzyme is substantially identical to any of the polynucleotide sequences of SEQ ID NOs:1, 3, 5, 7, 9, or 11. In some embodiments, the lignin biosynthesis enzyme is substantially identical to any of the polypeptide sequences of SEQ ID NOs:2, 4, 6, 8, 10, or 12. Additionally, many of the enzymes involved in lignin biosynthesis are conserved among species. Thus, in some embodiments, the polynucleotide encoding a lignin biosynthesis enzyme comprises a homolog of any of the polynucleotide sequences of SEQ ID NOs:1, 3, 5, 7, 9, or 11. In some embodiments, the lignin biosynthesis enzyme comprises a homolog of any of the polypeptide sequences of SEQ ID NOs:2, 4, 6, 8, 10, or 12 or any of the polypeptide sequences shown in any of FIGS. 1-6.

[0150] In some embodiments, the polynucleotide encoding a lignin biosynthesis enzyme comprises a polynucleotide sequence that is substantially identical (e.g., at least 50%, at least 55%, at least 60%, at least 65%, at least 70%, at least 75%, at least 80%, at least 85%, at least 90%, at least 91%, at least 92%, at least 93%, at least 94%, at least 95%, at least 96%, at least 97%, at least 98%, or at least 99% identical) to any of SEQ ID NOs:1, 3, 5, 7, 9, or 11. In some embodiments, the polynucleotide encoding a lignin biosynthesis enzyme comprises a polynucleotide sequence that encodes a polypeptide sequence that is substantially identical (e.g., at least 50%, at least 55%, at least 60%, at least 65%, at least 70%, at least 75%, at least 80%, at least 85%, at least 90%, at least 91%, at least 92%, at least 93%, at least 94%, at least 95%, at least 96%, at least 97%, at least 98%, or at least 99% identical) to any of SEQ ID NOs:2, 4, 6, 8, 10, or 12 or any of the polypeptide sequences shown in any of FIGS. 1-6. In some embodiments, the lignin biosynthesis enzyme comprises an amino acid sequence that is substantially identical (e.g., at least 50%, at least 55%, at least 60%, at least 65%, at least 70%, at least 75%, at least 80%, at least 85%, at least 90%, at least 91%, at least 92%, at least 93%, at least 94%, at least 95%, at least 96%, at least 97%, at least 98%, or at least 99% identical) to any of SEQ ID NOs:2, 4, 6, 8, 10, or 12 or any of the polypeptide sequences shown in any of FIGS. 1-6.

[0151] Gene and protein sequences and/or accession numbers for PAL, C4H, 4CL, HCT, C3H, and CCR1 are described in the Sequence Listing herein. Amino acid sequence alignments for lignin biosynthesis enzymes showing the amino acid sequences for each of these proteins from multiple plant species are shown in FIGS. 1-6. Additionally, gene and protein sequences for these proteins, and methods for obtaining the genes or proteins, are known and described in the art. See, for example, Schilmiller et al., 2009, Plant J., doi: 10.1111/j.1365−313X.2009.03996.x. One of skill in the art will recognize that these gene or protein sequences known in the art and/or as described herein can be modified to make substantially identical lignin biosynthesis enzymes, e.g., by making conservative substitutions at one or more amino acid residues. One of skill will also recognize that the known sequences (e.g., the alignments provided herein) provide guidance as to what amino acids may be varied to make a substantially identical lignin biosynthesis enzyme. For example, using any of the alignments shown in FIGS. 1-6, one of skill will recognize which amino acid residues are not highly conserved and thus can likely be changed without resulting in a significant effect on the function of the lignin biosynthesis enzyme.

[0152] 2. Xylan Biosynthesis Enzymes

[0153] The methods of the invention can also employ xylan biosynthesis enzymes. Several enzymes involved in xylan biosynthesis are known. Glycosyltransferases (GTs) belonging to the family GT43 (known as IRX9, IRX9-like, IRX14 and IRK14-like) have been demonstrated to be involved in xylan biosynthesis. The nomenclature for GT families used here is according to the CAZy database (www.cazy.org) (Cantarel et al., 2009). Other GTs in the GT47 family have also been shown to be involved in xylan biosynthesis: IRX10, IRX10-like, IRX7 and F8H. In addition GTs in GT8 have been shown to be involved in xylan biosynthesis: IRX8 (GAUT12) and PARVUS (GATL1). All the mentioned enzymes are known to be involved in xylan biosynthesis because plants where the genes have been mutated are deficient in xylan. (Brown, 2009; Wu et al., 2010) (Lee et al., 2009) (Pena et al., 2007; Persson et al., 2007; Liepman et al., 2010; Scheller and Ulvskov, 2010). Proteins belonging to the DUF579 family (also known as IRX15) are also involved in xylan biosynthesis although they do not appear to be GTs (Brown et al., 2011). The GTs responsible for adding glucuronic acid residues to the xylan backbone have been identified and are known as PGSIP or GUX, however, inactivation of these genes does not lead to xylan deficiency (Mortimer et al., 2010; Oikawa et al., 2010). GTs involved in adding arabinose residues to the xylan backbone have been identified in the literature as members of the GT61 family of enzymes (Anders et al. 2012). Proteins involved in O-acetylation of polysaccharides, including xylan, have been identified and designated as RWA proteins (Manabe et al., 2011), and proteins involved in O-acetylation of xyloglucan and mannan have been shown to be members of the DUF231 family (Gille et al. 2011). Most likely other members of the large DUF231 family are required for xylan O-acetylation.

[0154] Protein sequences and accession numbers for various IRX proteins and Parvus proteins are shown in FIGS. 7-12. FIGS. 7-12 provide amino acid sequence alignments of the indicated proteins. Additionally, gene and protein sequences for these proteins, and methods for obtaining the genes or proteins, are known and described in the art. One of skill in the art will recognize that these gene or protein sequences known in the art and/or as described herein can be modified to make substantially identical lignin biosynthesis enzymes, e.g., by making conservative substitutions at one or more amino acid residues. One of skill will also recognize that the known sequences (e.g., the alignments provided herein) provide guidance as to what amino acids may be varied to make a substantially identical lignin biosynthesis enzyme. For example, using any of the alignments shown in FIGS. 7-12, one of skill will recognize which amino acid residues are not highly conserved and thus can likely be changed without resulting in a significant effect on the function of the lignin biosynthesis enzyme.

[0155] In addition to the xylan synthesis genes (e.g., those listed hereinabove) a similar strategy may also be used to regulate polysaccharide O-acetylation expression patterns via RWA gene expression. RWA proteins function in acetylation in general, including in xylan O-acetylation. Thus, combining specific expression of RWA with the RWA knock-out/downregulation plants that have very low acetate content but still have excellent growth properties can also be produced using the techniques described herein. In Arabidopsis there are 4 RWA genes and three (RWA1, RWA3 and RWA4) are predominantly expressed in tissues with secondary walls (Manabe et al., 2011;). Downregulation or inactivation of two or more of these RWA genes results in decreased xylan O-acetylation and impaired function of vascular tissues (Scheller et al., 2010; WO/2010/096488). Thus, RWA may be downregulated in plants, e.g., using methods and compositions described in WO2010/096488 and an RWA gene then reintroduced into the plant where the RWA gene is under the control of a promoter/transcription factor as described herein. Alternative to targeting RWA proteins, one or more DUF231 proteins involved in xylan O-acetylation can be targeted.

[0156] Although the genes and proteins used as illustrations above have been studied primarily using Arabidopsis thaliana, orthologs are easily identified in other plant species. For example, for many genes, it has been demonstrated by complementation experiments, silencing, or RNAi that orthologs from other plants have the same function as the A. thaliana proteins (Zhou et al., 2006; Zhou et al., 2007; Lee et al., 2009).

[0157] Gene and protein sequences and/or accession numbers for IRX8, IRX14, IRX14-like, IRX9, IRX9-like, IRX7, IRX10, IRX10-like, IRX15, IRX15-like, F8H, and PARVUS are described herein. Amino acid sequence alignments for xylan biosynthesis enzymes showing the amino acid sequences for each of these proteins from multiple plant species are also shown in FIGS. 7-12. Additionally, gene and protein sequences for these proteins, and methods for obtaining the genes or proteins, are known and described in the art as discussed above. One of skill in the art will recognize that these gene or protein sequences known in the art and/or as described herein can be modified to make substantially identical xylan biosynthesis enzymes, e.g., by making conservative substitutions at one or more amino acid residues. One of skill will also recognize that the known sequences (e.g., the alignments provided herein) provide guidance as to what amino acids may be varied to make a substantially identical xylan biosynthesis enzyme. For example, using any of the alignments shown in FIGS. 7-12, one of skill will recognize which amino acid residues are not highly conserved and thus can likely be changed without resulting in a significant effect on the function of the xylan biosynthesis enzyme.

[0158] 3. Vessel-Specific Promoters

[0159] In some embodiments, the polynucleotide encoding the lignin biosynthesis enzyme or xylan biosynthesis enzyme is operably linked to a vessel-specific promoter. The vessel-specific promoter is heterologous to the polynucleotide encoding the lignin biosynthesis enzyme or xylan biosynthesis enzyme (i.e., is not the native promoter associated with the lignin biosynthesis enzyme or xylan biosynthesis enzyme). A promoter is suitable for use as a vessel-specific promoter if the promoter is expressed strongly in vessel cells of the plant but is expressed at lower levels in fiber cells of the plant as compared to the level of expression of the native promoter of the lignin biosynthesis enzyme or xylan biosynthesis enzyme whose expression is to be modified.

[0160] In some embodiments, the promoter is substantially identical (e.g., at least 50%, at least 55%, at least 60%, at least 65%, at least 70%, at least 75%, at least 80%, at least 85%, at least 90%, at least 91%, at least 92%, at least 93%, at least 94%, at least 95%, at least 96%, at least 97%, at least 98%, or at least 99% identical) to the native promoter of a gene encoding vascular-related NAC-domain 1 (VND1), VND2, VND3, VND4, VND5, VND6, VND7, or VND-interacting 2 (VNI2). In some embodiments, the promoter is substantially identical (e.g., at least 50%, at least 55%, at least 60%, at least 65%, at least 70%, at least 75%, at least 80%, at least 85%, at least 90%, at least 91%, at least 92%, at least 93%, at least 94%, at least 95%, at least 96%, at least 97%, at least 98%, or at least 99% identical) to the native promoter of a gene encoding REF4 or RFR1.

[0161] In some embodiments, the vessel-specific promoter comprises SEQ ID NO:36, 94, or 95. In some embodiments, the vessel-specific promoter comprises a subsequence of SEQ ID NO:36, 94, or 95 or a variant thereof. In some embodiments, the vessel-specific promoter comprises a subsequence of SEQ ID NO:36, 94, or 95 comprising about 50 to about 1000 or more contiguous nucleotides of the sequences. In some embodiments, the vessel-specific promoter comprises a subsequence of SEQ ID NO:36, 94, or 95 comprising 50 to 1000, 50 to 900, 50 to 800, 50 to 700, 50 to 600, 50 to 500, 50 to 400, 50 to 300, 50 to 200, 50 to 100; 75 to 1000, 75 to 900, 75 to 800, 75 to 700, 75 to 600, 75 to 500, 75 to 400, 75 to 300, 75 to 200; 100 to 1000, 100 to 900, 100 to 800, 100 to 700, 100 to 600, 100 to 500, 100 to 400, 100 to 300, or 100 to 200 contiguous nucleotides of the sequence.

[0162] Vessel-specific promoters are also described in the art. See, for example, Yamaguchi et al., 2010, Plant Cell; Kubo et al., 2009, Genes Dev.; and Yamaguchi et al., 2008, Plant J.; each of which is incorporated by reference herein in its entirety.

[0163] It will be appreciated by one of skill in the art that a promoter region can tolerate considerable variation without diminution of activity. Thus, in some embodiments, the vessel-specific promoter is substantially identical (e.g., at least 50%, at least 55%, at least 60%, at least 65%, at least 70%, at least 75%, at least 80%, at least 85%, at least 90%, at least 91%, at least 92%, at least 93%, at least 94%, at least 95%, at least 96%, at least 97%, at least 98%, or at least 99% identical) to SEQ ID NO:36, SEQ ID NO:94, or SEQ ID NO:95.

[0164] 4. Genetic Background of Plants

[0165] In some embodiments, a plant in which an expression cassette comprising a lignin or xylan biosynthesis enzyme is to be introduced has a genetic background that is modified to have a reduced level of activity of the lignin or xylan biosynthesis enzyme. In some embodiments, the plant is modified to have a level of activity of the lignin or xylan biosynthesis enzyme that is reduced throughout the entire plant. In some embodiments, the plant is modified to have a level of activity of the lignin or xylan biosynthesis enzyme that is reduced only in a subset of cells or tissues of the plant. The genetic background of the plant can be modified according to any method known in the art, such as antisense, siRNA, microRNA, dsRNA, sense suppression, mutagenesis, or use of a dominant negative inhibition strategy. In some embodiments, the level of expression of the protein is reduced. In some embodiments, the modified plant having the reduced level of activity, or expression, of a lignin and/or xylan biosynthesis enzyme is then used to express an expression cassette expressing that same lignin and/or xylan biosynthesis enzyme, but under the control of a vessel-specific promoter rather than its native promoter. In some embodiments, the lignin and/or xylan biosynthesis enzyme that is introduced into the plant by expression cassette is substantially identical, but not completely identical, to the lignin and/or xylan biosynthesis enzyme that is reduced in the plant, in order to avoid silencing of the lignin and/or xylan biosynthesis enzyme that is introduced by the expression cassette (e.g., silent nucleotide changes can be made in the lignin and/or xylan biosynthesis enzyme that is introduced by the expression cassette such that the amino acid sequence, but not the nucleotide sequence, is identical to the lignin and/or xylan biosynthesis enzyme being reduced in the plant).

[0166] a) Gene Silencing Techniques

[0167] In some embodiments, expression of the lignin or xylan biosynthesis enzyme is inhibited by an antisense oligonucleotide. In antisense technology, a nucleic acid segment from the desired gene is cloned and operably linked to a promoter such that the antisense strand of RNA will be transcribed. The expression cassette is then transformed into plants and the antisense strand of RNA is produced. In plant cells, it has been suggested that antisense RNA inhibits gene expression by preventing the accumulation of mRNA which encodes the enzyme of interest, see, e.g., Sheehy et al., Proc. Nat. Acad. Sci. USA, 85:8805-8809 (1988); Pnueli et al., The Plant Cell 6:175-186 (1994); and Hiatt et al., U.S. Pat. No. 4,801,340.

[0168] The antisense nucleic acid sequence transformed into plants will be substantially identical to at least a portion of the endogenous gene or genes to be repressed. The sequence, however, does not have to be perfectly identical to inhibit expression. Thus, an antisense or sense nucleic acid molecule encoding only a portion of the lignin or xylan biosynthesis enzyme-encoding sequence can be useful for producing a plant in which expression of the lignin or xylan biosynthesis enzyme is inhibited. For antisense suppression, the introduced sequence also need not be full length relative to either the primary transcription product or fully processed mRNA. Generally, higher homology can be used to compensate for the use of a shorter sequence. Furthermore, the introduced sequence need not have the same intron or exon pattern, and homology of non-coding segments may be equally effective. In some embodiments, a sequence of at least, e.g., 20, 25, 30, 50, 100, 200, or more continuous nucleotides (up to mRNA full length) substantially identical to an endogenous lignin or xylan biosynthesis enzyme mRNA, or a complement thereof, can be used.

[0169] Catalytic RNA molecules or ribozymes can also be used to inhibit expression of a gene encoding a lignin or xylan biosynthesis enzyme. It is possible to design ribozymes that specifically pair with virtually any target RNA and cleave the phosphodiester backbone at a specific location, thereby functionally inactivating the target RNA. In carrying out this cleavage, the ribozyme is not itself altered, and is thus capable of recycling and cleaving other molecules, making it a true enzyme. The inclusion of ribozyme sequences within antisense RNAs confers RNA-cleaving activity upon them, thereby increasing the activity of the constructs.

[0170] A number of classes of ribozymes have been identified. One class of ribozymes is derived from a number of small circular RNAs that are capable of self-cleavage and replication in plants. The RNAs replicate either alone (viroid RNAs) or with a helper virus (satellite RNAs). Examples include RNAs from avocado sunblotch viroid and the satellite RNAs from tobacco ringspot virus, lucerne transient streak virus, velvet tobacco mottle virus, solanum nodiflorum mottle virus and subterranean clover mottle virus. The design and use of target RNA-specific ribozymes is described in Haseloff et al. Nature, 334:585-591 (1988).

[0171] Another method by which expression of a gene encoding a lignin or xylan biosynthesis enzyme can be inhibited is by sense suppression (also known as co-suppression). Introduction of expression cassettes in which a nucleic acid is configured in the sense orientation with respect to the promoter has been shown to be an effective means by which to block the transcription of target genes. For an example of the use of this method to modulate expression of endogenous genes, see Napoli et al., The Plant Cell 2:279-289 (1990); Flavell, Proc. Natl. Acad. Sci., USA 91:3490-3496 (1994); Kooter and Mol, Current Opin. Biol. 4:166-171 (1993); and U.S. Pat. Nos. 5,034,323, 5,231,020, and 5,283,184.

[0172] Generally, where inhibition of expression is desired, some transcription of the introduced sequence occurs. The effect may occur where the introduced sequence contains no coding sequence per se, but only intron or untranslated sequences homologous to sequences present in the primary transcript of the endogenous sequence. The introduced sequence generally will be substantially identical to the endogenous sequence intended to be repressed. This minimal identity will typically be greater than about 65%, but a higher identity can exert a more effective repression of expression of the endogenous sequences. In some embodiments, sequences with substantially greater identity are used, e.g., at least about 80%, at least about 95%, or 100% identity are used. As with antisense regulation, further discussed below, the effect can be designed and tested to apply to any other proteins within a similar family of genes exhibiting homology or substantial homology.

[0173] For sense suppression, the introduced sequence in the expression cassette, needing less than absolute identity, also need not be full length, relative to either the primary transcription product or fully processed mRNA. Furthermore, the introduced sequence need not have the same intron or exon pattern, and identity of non-coding segments will be equally effective. In some embodiments, a sequence of the size ranges noted above for antisense regulation is used, i.e., 30-40, or at least about 20, 50, 100, 200, 500 or more nucleotides.

[0174] Endogenous gene expression may also be suppressed by means of RNA interference (RNAi) (and indeed co-suppression can be considered a type of RNAi), which uses a double-stranded RNA having a sequence identical or similar to the sequence of the target gene. RNAi is the phenomenon in which when a double-stranded RNA having a sequence identical or similar to that of the target gene is introduced into a cell, the expressions of both the inserted exogenous gene and target endogenous gene are suppressed. The double-stranded RNA may be formed from two separate complementary RNAs or may be a single RNA with internally complementary sequences that form a double-stranded RNA. Although complete details of the mechanism of RNAi are still unknown, it is considered that the introduced double-stranded RNA is initially cleaved into small fragments, which then serve as indexes of the target gene in some manner, thereby degrading the target gene. RNAi is known to be also effective in plants (see, e.g., Chuang, C. F. & Meyerowitz, E. M., Proc. Natl. Acad. Sci. USA 97: 4985 (2000); Waterhouse et al., Proc. Natl. Acad. Sci. USA 95:13959-13964 (1998); Tabara et al. Science 282:430-431 (1998); Matthew, Comp Funct Genom 5: 240-244 (2004); Lu, et al., Nucleic Acids Res. 32(21):e171 (2004)).

[0175] Thus, in some embodiments, inhibition of a gene encoding a lignin or xylan biosynthesis enzyme is accomplished using RNAi techniques. For example, to achieve suppression of the expression of a DNA encoding a protein using RNAi, a double-stranded

[0176] RNA having the sequence of a DNA encoding the protein, or a substantially similar sequence thereof (including those engineered not to translate the protein) or fragment thereof, is introduced into a plant of interest. As used herein, RNAi and dsRNA both refer to gene-specific silencing that is induced by the introduction of a double-stranded RNA molecule, see e.g., U.S. Pat. Nos. 6,506,559 and 6,573,099, and includes reference to a molecule that has a region that is double-stranded, e.g., a short hairpin RNA molecule. The resulting plants may then be screened for a phenotype associated with the target protein, for example, screening for an increase in the extractability of sugar from the plants as compared to wild-type plants, and/or by monitoring steady-state RNA levels for transcripts encoding the protein. Although the genes used for RNAi need not be completely identical to the target gene, they may be at least 70%, 80%, 90%, 95% or more identical to the target gene sequence. See, e.g., U.S. Patent Publication No. 2004/0029283. The constructs encoding an RNA molecule with a stem-loop structure that is unrelated to the target gene and that is positioned distally to a sequence specific for the gene of interest may also be used to inhibit target gene expression. See, e.g., U.S. Patent Publication No. 2003/0221211.

[0177] The RNAi polynucleotides may encompass the full-length target RNA or may correspond to a fragment of the target RNA. In some cases, the fragment will have fewer than 100, 200, 300, 400, 500 600, 700, 800, 900 or 1,000 nucleotides corresponding to the target sequence. In addition, in some embodiments, these fragments are at least, e.g., 50, 100, 150, 200, or more nucleotides in length. In some cases, fragments for use in RNAi will be at least substantially similar to regions of a target protein that do not occur in other proteins in the organism or may be selected to have as little similarity to other organism transcripts as possible, e.g., selected by comparison to sequences in analyzing publicly-available sequence databases.

[0178] Expression vectors that continually express siRNA in transiently- and stably-transfected have been engineered to express small hairpin RNAs, which get processed in vivo into siRNAs molecules capable of carrying out gene-specific silencing (Brummelkamp et al., Science 296:550-553 (2002), and Paddison, et al., Genes & Dev. 16:948-958 (2002)). Post-transcriptional gene silencing by double-stranded RNA is discussed in further detail by Hammond et al. Nature Rev Gen 2: 110-119 (2001), Fire et al. Nature 391: 806-811 (1998) and Timmons and Fire Nature 395: 854 (1998).

[0179] Yet another way to suppress expression of an endogenous plant gene is by recombinant expression of a microRNA that suppresses a target (e.g., a gene encoding a lignin or xylan biosynthesis enzyme). Artificial microRNAs are single-stranded RNAs (e.g., between 18-25-mers, generally 21-mers), that are not normally found in plants and that are processed from endogenous miRNA precursors. Their sequences are designed according to the determinants of plant miRNA target selection, such that the artificial microRNA specifically silences its intended target gene(s) and are generally described in Schwab et al, The Plant Cell 18:1121-1133 (2006) as well as the internet-based methods of designing such microRNAs as described therein. See also, US Patent Publication No. 2008/0313773.

[0180] Another example of a method to reduce levels of a gene expression product of a gene or gene of interest employ riboswitch techniques (see, e.g., U.S. Patent Application Publication Nos. US20100286082, and US20110245326).

[0181] Methods of inhibiting plant gene expression for one or more lignin and/or xylan biosynthesis enzymes, including plants that have inhibited RWA expression, have been described in the art. See, for example, Coleman et al., Plant Physiol. 148:1229-37 (2008) (C3′H RNAi in poplar); Kitin et al., Plant Physiol. 154:887-98 (2010) (4CL antisense in poplar); Coleman et al., Proc. Acad. Natl. Sci. USA 105:4501-06 (2008) (C3′H RNAi in poplar); and Voelker et al., Plant Physiol. 154:874-86 (2010) (4CL antisense in poplar), and WO2010/096488 (RWA inhibition), each of which is incorporated by reference herein in its entirety.

[0182] As appreciated by one of skill in the art, the isoforms that are highly expressed in xylem and fibers are targeted. For example, using Arabidopsis for illustration purposes, IRX7, IRX8, IRX9, PARVUS, IRX15 are highly expressed in xylem and fibers and would therefore be targeted. For IRX10 and IRX14, both isoforms (Arabidopsis has 2 isoforms) would be typically targeted since they both have expression in xylem and fibers. Similarly, for making plants that are inhibited in Rwa expression, the isoforms that are expressed in xylem and fibers are targeted. For example, again using Arabidopsis for illustration, one of, typically two or more of, RWA1, RWA3 and RWA4 are targeted (RWA2 is not expressed in xylem and fibers).

[0183] As further understood in the art, in the steps of the methods of the invention in which the activity is introduced back into the xylan-deficient or lignin-deficient plant using a vessel specific promoter (e.g. VND6), it is not necessary to express the same isoform as the one that was targeted for inhibition. For example, an irx9 mutant plant may be employed that has very little xylan, but it is not necessary to express the tissue specific IRX9 isoform in the plant, rather a IRX9 homolog that is not normally expressed in those tissues may also be readily employed. Many plants, including Arabidopsis, have a second IRX9-like gene which is mostly expressed in tissues apart other than xylem and fibers. Similar relationships are true for IRX7/F8H, IRX14/IRX14-like, and IRX15/IRX15-like. Likewise, RWA1/RWA3/RWA4 mutants can be engineered to express Rwa2 under control of the vessel-specific promoter, e.g., a VND6 promoter.

[0184] b) Plants Having Mutant Backgrounds

[0185] In some embodiments, the level of expression of the lignin or xylan biosynthesis enzyme is reduced by generating a plant that has a mutation in a gene encoding the lignin or xylan biosynthesis enzyme. One method for abolishing or decreasing the expression of a gene encoding a lignin or xylan biosynthesis enzyme is by insertion mutagenesis using the T-DNA of Agrobacterium tumefaciens. After generating the insertion mutants, the mutants can be screened to identify those containing the insertion in the gene of interest. Mutants containing a single mutation event at the desired gene may be crossed to generate homozygous plants for the mutation (Koncz et al. (1992) Methods in Arabidopsis Research. World Scientific).

[0186] Alternatively, random mutagenesis approaches may be used to generate new alleles that will generate truncated or defective (non-functional or poorly active) enzymes or unstable RNA, or to disrupt or “knock-out” the expression of a gene encoding a lignin or xylan biosynthesis enzyme using either chemical or insertional mutagenesis or irradiation. One method of mutagenesis and mutant identification is known as TILLING (for targeting induced local lesions in genomes). In this method, mutations are induced in the seed of a plant of interest, for example, using EMS treatment. The resulting plants are grown and self-fertilized, and the progeny are assessed. For example, the plants may be assessed using PCR to identify whether a mutated plant has a mutation in the gene of interest, or by evaluating whether the plant has reduced lignin content in a part of the plant that expressed the gene of interest. TILLING can identify mutations that may alter the expression of specific genes or the activity of proteins encoded by these genes (see Colbert et al (2001) Plant Physiol 126:480-484; McCallum et al (2000) Nature Biotechnology 18:455-457).

[0187] Methods of making plants having a mutant background for one or more lignin and/or xylan biosynthesis enzymes have been described in the art. See, for example, Schilmiller et al., Plant J. 60:771-82 (2009) (Arabidopsis mutant for C4H); and Weng et al., Plant Cell 22:1033-45 (2010) (Selaginella mutant for F5H), each of which is incorporated by reference herein in its entirety. Methods of making plants that have an RWA mutant background are described, e.g., in WO2010/096488.

[0188] In some embodiments, where expression cassettes comprising a lignin biosynthesis enzyme and a xylan biosynthesis enzyme are to be introduced into a plant, the plant has a genetic background that is modified to have reduced levels of expression of both the lignin biosynthesis enzyme and the xylan biosynthesis enzyme. Such plants can be generated using known methods as described herein sections of the application describing modification of plants to suppress or reduce expression of a desired product.

[0189] B. Modification of Expression Using a Transcription Factor that Regulates the Production of Secondary Cell Wall

[0190] In another aspect, the present invention provides methods of engineering a plant having increased secondary cell wall deposition. In some embodiments, the method comprises:
[0191] introducing an expression cassette into the plant, wherein the expression cassette comprises a polynucleotide encoding a transcription factor that regulates the production of secondary cell wall in woody tissue operably linked to an induced heterologous promoter, wherein the promoter is substantially identical to the native promoter of a gene that is a downstream target of the transcription factor in the biosynthetic pathway; and
[0192] culturing the plant under conditions in which the transcription factor is expressed. The downstream target may be a direct or indirect target of the transcription factor.

[0193] The expression cassette as described herein, when introduced into a plant, generates a positive feedback loop that allows the maintenance of expression or the overexpression of genes involved in secondary cell wall biosynthesis, due to the transcription factor directly or indirectly inducing expression of the promoter from the downstream target gene, which in turn is operably linked to the polynucleotide encoding the transcription factor, resulting in increased expression of the transcription factor. This positive feedback loop results in the continued production or overproduction of secondary cell walls components such as cellulose, hemicellulose, and lignin.

[0194] 1. Transcription Factors that Regulate the Production of Secondary Cell Wall

[0195] In some embodiments, the expression cassette comprises a polynucleotide encoding a transcription factor that regulates the production of secondary cell wall. A transcription factor may be selected for use in the present invention on the basis that it induces one or more genes involved in lignin biosynthesis and/or polysaccharide (cellulose and hemicellulose) biosynthesis. Alternatively or additionally, the transcription factor may be selected for use on the basis of an overexpression or loss-of-function phenotype in a plant (e.g., a plant overexpressing that transcription factor that exhibits a phenotype of increased cell wall thickening or secondary cell wall deposition, or a plant having a dominant repression or loss-of-function mutation of that transcription factor that exhibits a phenotype of decreased cell wall thickening or secondary cell wall deposition). In some embodiments, the transcription factor is NAC secondary wall-thickening promoting factor 1 (NST1), NST2, NST3, secondary wall-associated NAC domain protein 2 (SND2), SND3, MYB domain protein 103 (MYB103), MBY85, MYB46, MYB83, MYB58, or MYB63.

[0196] The transcription factors NST1, NST2, NST3, SND2, SND3, MYB103, MBY85, MYB46, MYB83, MYB58, and MYB63 have been characterized in Arabidopsis and have been shown to regulate secondary cell wall production in that species. See, e.g., Mitsuda et al., Plant Cell 17:2993-3006 (2005); Mitsuda et al., Plant Cell 19:270-80 (2007); Ohashi-Ito et al., Plant Cell 22:3461-73 (2010); Zhong et al., Plant Cell 20:2763-82 (2008); Zhong et al., Plant Cell 19:2776-92 (2007); Ko et al., Plant J. 60:649-65 (2009); and McCarthy et al., Plant Cell Physiol. 50:1950-64 (2009). Thus, in some embodiments, the polynucleotide encoding a transcription factor that regulates the production of secondary cell wall is substantially identical to any of the polynucleotide sequences of SEQ ID NOs:13, 15, 17, 19, 21, 23, 25, 27, 29, 31, or 33. Additionally, these transcription factors have been identified in a variety of other plants, including rice, sorghum, poplar, grape, moss, maize, and switchgrass. Furthermore, the general mechanism of secondary cell wall biosynthesis is conserved not only between monocots and dicots, but also within these groups. Thus, in some embodiments, the polynucleotide encoding a transcription factor that regulates the production of secondary cell wall comprises a homolog of any of the polynucleotide sequences of SEQ ID NOs:13, 15, 17, 19, 21, 23, 25, 27, 29, 31, or 33 or any of the amino acid sequences of SEQ ID NOs:14, 16, 18, 20, 22, 24, 26, 28, 30, 32, or 34 or any of the amino acid sequences of FIG. 13.

[0197] In some embodiments, the polynucleotide encoding a transcription factor that regulates the production of secondary cell wall in woody tissue comprises a polynucleotide sequence that is substantially identical (e.g., at least 50%, at least 55%, at least 60%, at least 65%, at least 70%, at least 75%, at least 80%, at least 85%, at least 90%, at least 91%, at least 92%, at least 93%, at least 94%, at least 95%, at least 96%, at least 97%, at least 98%, or at least 99% identical) to any of SEQ ID NOs:13, 15, 17, 19, 21, 23, 25, 27, 29, 31, or 33. In some embodiments, the polynucleotide encoding a transcription factor that regulates the production of secondary cell wall in woody tissue comprises a polynucleotide sequence that encodes a polypeptide sequence that is substantially identical (e.g., at least 50%, at least 55%, at least 60%, at least 65%, at least 70%, at least 75%, at least 80%, at least 85%, at least 90%, at least 91%, at least 92%, at least 93%, at least 94%, at least 95%, at least 96%, at least 97%, at least 98%, or at least 99% identical) to any of SEQ ID NOs:14, 16, 18, 20, 22, 24, 26, 28, 30, 32, or 34. In some embodiments, the transcription factor that regulates the production of secondary cell wall in woody comprises an amino acid sequence that is substantially identical (e.g., at least 50%, at least 55%, at least 60%, at least 65%, at least 70%, at least 75%, at least 80%, at least 85%, at least 90%, at least 91%, at least 92%, at least 93%, at least 94%, at least 95%, at least 96%, at least 97%, at least 98%, or at least 99% identical) to any of SEQ ID NOs:14, 16, 18, 20, 22, 24, 26, 28, 30, 32, or 34 or to any of the amino acid sequences of FIG. 13.

[0198] Gene and protein sequences and/or accession numbers for NST1, NST2, NST3, SND2, SND3, MYB103, MBY85, MYB46, MYB83, MYB58, and MYB63 are described in the Sequence Listing herein. Additionally, amino acid sequence alignments for the transcription factors, showing the amino acid sequences for each of these proteins from multiple plant species, are shown in FIGS. 1-6. Gene and protein sequences for these proteins, and methods for obtaining the genes or proteins, are also known and described in the art. See, for example, Goiocoechea et al., 2005, Plant J. 43:553-67; McCarthy et al., 2009, Plant Cell Physiol. 50:1950-64; Shen et al., 2009, Bioenerg. Res. 2:217-32; and Zhong et al., 2010, Trends in Plant Sciences, http://dx.doi.org/10.1016/j.tplants.2010.08.007. One of skill in the art will recognize that these gene or protein sequences known in the art and/or as described herein can be modified to make substantially identical transcription factors, e.g., by making conservative substitutions at one or more amino acid residues. One of skill will also recognize that the known sequences (e.g., the alignments provided herein) provide guidance as to what amino acids may be varied to make a substantially identical transcription factor. For example, using any of the alignments shown in FIGS. 1-6, one of skill will recognize which amino acid residues are not highly conserved and thus can likely be changed without resulting in a significant effect on the function of the transcription factor.

[0199] 2. Promoters from Downstream Targets of the Transcription Factors that Regulate the Production of Secondary Cell Wall

[0200] In some embodiments, the polynucleotide encoding the transcription factor that regulates secondary cell wall production is operably linked to a promoter that is a downstream target of the transcription factor. The promoter is heterologous to the polynucleotide encoding the transcription factor that regulates secondary cell wall production (i.e., is not the native promoter associated with the transcription factor that regulates secondary cell wall production). A promoter is suitable for use with the transcription factor that regulates secondary cell wall production if expression of the promoter is induced, directly or indirectly, by the transcription factor to be expressed, and if the promoter is expressed in the desirect location, e.g., the stem of the plant but not strongly expressed in leaves of the plant.

[0201] In some embodiments, the promoter is substantially identical (e.g., at least 50%, at least 55%, at least 60%, at least 65%, at least 70%, at least 75%, at least 80%, at least 85%, at least 90%, at least 91%, at least 92%, at least 93%, at least 94%, at least 95%, at least 96%, at least 97%, at least 98%, or at least 99% identical) to the native promoter of a gene that is a downstream target of the transcription factor. In some embodiments, the promoter is substantially identical to the native promoter of IRX1, IRX3, IRX5, IRX8, IRX9, IRX14, IRX7, or IRX10. In some embodiments, the transcription factor is selected from NST1, NST2, NST3, SND2, SND3, MYB103, MBY85, MYB46, MYB83, MYB58, and MYB63 and the promoter is substantially identical to a native promoter selected from IRX1, IRX3, IRX5, IRX8, IRX9, IRX14, IRX7, IRX10, GAUT13, or GAUT14. See FIG. 14. Alternative promoters may also be used. For example, alternative promoters can be identified by coexpression analysis, e.g., using Atted II database and known promoters as bait; or by identifying functional motifs of interest in the promoters of candidate genes. Promoters from other genes that are regulated by the transcription factor may also be used.

[0202] In some embodiments, the promoter comprises a subsequence of SEQ ID NO:35 or a variant thereof. In some embodiments, the promoter comprises a subsequence of SEQ ID NO:35 comprising about 50 to about 1000 or more contiguous nucleotides of SEQ ID NO:35. In some embodiments, the promoter comprises a subsequence of SEQ ID NO:35 comprising 50 to 1000, 50 to 900, 50 to 800, 50 to 700, 50 to 600, 50 to 500, 50 to 400, 50 to 300, 50 to 200, 50 to 100; 75 to 1000, 75 to 900, 75 to 800, 75 to 700, 75 to 600, 75 to 500, 75 to 400, 75 to 300, 75 to 200; 100 to 1000, 100 to 900, 100 to 800, 100 to 700, 100 to 600, 100 to 500, 100 to 400, 100 to 300, or 100 to 200 contiguous nucleotides of SEQ ID NO:35.

[0203] Promoters that are downstream targets of the transcription factors described herein are also described in the art. See, for example, Oikawa et al, 2010, PLoS ONE; Taylor et al., 2000, Plant Cell; Betancur et al., 2010, J. Integrative Plant Biol.; Persson et al., 2007, Plant Physiol.; Wu et al., 2010, Plant Physiol.; Zhong et al., 2005, Plant Cell; and Wu et al., 2009, Plant J.; each of which is incorporated by reference herein in its entirety.

[0204] It will be appreciated by one of skill in the art that a promoter region can tolerate considerable variation without diminution of activity. Thus, in some embodiments, the promoter is substantially identical (e.g., at least 50%, at least 55%, at least 60%, at least 65%, at least 70%, at least 75%, at least 80%, at least 85%, at least 90%, at least 91%, at least 92%, at least 93%, at least 94%, at least 95%, at least 96%, at least 97%, at least 98%, or at least 99% identical) to SEQ ID NO:35.

[0205] C. Modification of Expression Using a Transcription Factor that Regulates Wax/Cutin Production

[0206] Improving plant water use efficiency is an important priority to reduce water consumption by plant per ton of CO₂ fixed and improve plant drought stress tolerance. It would improve or maintain biomass yields under water limiting conditions by reducing cellular oxidative stresses, which also cause a reduction of photosynthesis efficiency. Developing strategies that can reduce water losses by plants without reducing biomass yield reduces water needs, improves drought stress tolerance and is compatible with drought stress tolerance technologies already developed. Part of the water that is lost by plants occurs by water evaporation through the cuticle on the surface of leaf epidermis, also called epicuticle. Transcription factors to control wax/cutin biosynthesis have been identified. Although overexpression in plants of some of these in plants improved resistance to drought-stress and reduced water losses, the expression strategies used to increase the expression of these transcription factors also caused deposition of wax or/and cutin in sensitive tissues generating undesired effects on plant growth and development (Aharoni et al., The Plant Cell 16:2463-2480, 2004; Zhang et al., Plant J. 42:689-797, 2005). Beyond water use efficiency, modifying epicuticular wax composition and content has several other potential advantages since the epicuticle is the first barrier for many pathogens, insects and chemicals. The invention thus provides an artificial positive feedback loop system to increase wax and/or cutin deposition on the epidermis of plants in order to improve plant water use efficiency and drought-stress tolerance.

[0207] Thus, in another aspect, the present invention provides methods of engineering a plant having modified, e.g., increased, wax and/or cutin production. In some embodiments, the method comprises:
[0208] introducing an expression cassette into the plant, wherein the expression cassette comprises a polynucleotide encoding a transcription factor that regulates the production of wax/cutin components linked to a heterologous induced promoter, wherein the promoter is substantially identical to the native promoter of a gene that is a downstream target of the transcription factor; and
[0209] culturing the plant under conditions in which the transcription factor is expressed. The downstream target may be a direct or indirect target of the transcription factor.

[0210] The expression cassette as described herein, when introduced into a plant, generates a positive feedback loop that allows the maintenance of expression or the overexpression of genes involved in wax and/or cutinbiosynthesis, due to the transcription factor directly or indirectly inducing expression driven by the promoter from the downstream target gene, which in turn is operably linked to the polynucleotide encoding the transcription factor, resulting in increased expression of the transcription factor. This positive feedback loop results in the continued production or overproduction of wax and/or cutin.

[0211] 1. Transcription Factors that Regulate the Production of Wax/Cutin

[0212] In some embodiments, the expression cassette comprises a polynucleotide encoding a transcription factor that regulates the production of wax and/or cutin components for the production of wax (and/or cutin). A transcription factor may be selected for use in the present invention on the basis that it induces one or more genes, typically multiple genes, involved in the wax biosynthetic pathway. Alternatively or additionally, the transcription factor may be selected for use on the basis of an overexpression or loss-of-function phenotype in a plant (e.g., a plant overexpressing that transcription factor that exhibits a phenotype of increased wax production, or a plant having a dominant repression or loss-of-function mutation of that transcription factor that exhibits a phenotype of decreased wax production). In some embodiments, the transcription factor is an shine (SHN) transcription factor, such as SHN1 (also known as WIN1), SHN2, SHN3, SHN4, SHN5, or MYB 96.

[0213] The transcription factors SHN1, SHN2, SHN3, SHN4, SHN5, and MYB96 have been characterized in Arabidopsis and have been shown to regulate wax and/or cutin biosynthesis in Arabidopsis and other plant species. See, e.g., Shi et al., PLoS Genet. 7, e1001388 (2011); Seo et al., Plant Cell 23:1138-1152 (2011); Kannangara et al., Plant Cell 19:1278-1294 (2007); Zhang et al., Plant J. 42:689-707 (2005), Aharoni et al., Plant Cell 16:2463-2480 (2004); Broun et al., Proc. Natl. Acad Sci USA 101:4706-4711 (2004); and Suh et al., Plant Physiol. 139:1649-1665 (2005). Additionally, SHN transcription factor sequences have been identified in a variety of other plants, including, including poplar, Medicago, rice, grasses e.g., Brachypodium, corn, sorghum, barley, spruce, spikemoss, and bryophtyes. Similarly, Myb96 transcription factor sequences have been identified in various other plants including Thellungiella, Medicago, poplar, grape vine, citrus, brachypodium, wheat, barley, rice, and sorghum. Furthermore, the general mechanism of wax/cutin biosynthesis is conserved not only between monocots and dicots, but also within these groups.

[0214] In some embodiments, the polynucleotide encoding a transcription factor that regulates the production of wax/cutin a encodes a SHN transcription factor. In some embodiments, the polynucleotides encodes an SHN transcription factor of any one of SEQ ID NOs:37-59, or a variant thereof. Thus, in some embodiments, the polynucleotide encoding a transcription factor that regulates the production of wax/cutin synthesis encodes a protein that is substantially identical to any one of SEQ ID NOS:37-59.

[0215] In some embodiments, the polynucleotide encoding a transcription factor that regulates the production of wax cutin synthesis comprises a polynucleotide sequence encodes an amino acid sequence that is at least 50%, at least 55%, at least 60%, at least 65%, at least 70%, at least 75%, at least 80%, at least 85%, at least 90%, at least 91%, at least 92%, at least 93%, at least 94%, at least 95%, at least 96%, at least 97%, at least 98%, or at least 99% identical to any of SEQ ID NOs:37-59.

[0216] In some embodiments, the polynucleotide encoding a transcription factor that regulates the production of wax/cutin a encodes a Myb96 transcription factor. In some embodiments, the polynucleotides encodes a Myb96 transcription factor of any one of SEQ ID NOS:80-93, or a variant thereof. Thus, in some embodiments, the polynucleotide encoding a transcription factor that regulates the production of wax/cutin synthesis encodes a protein that is substantially identical to any one of SEQ ID NOS:80-93.

[0217] In some embodiments, the polynucleotide encoding a transcription factor that regulates the production of wax cutin synthesis comprises a polynucleotide sequence encodes an amino acid sequence that is at least 50%, at least 55%, at least 60%, at least 65%, at least 70%, at least 75%, at least 80%, at least 85%, at least 90%, at least 91%, at least 92%, at least 93%, at least 94%, at least 95%, at least 96%, at least 97%, at least 98%, or at least 99% identical to any of SEQ ID NOS:80-93.

[0218] Illustrative protein sequences and/or accession numbers for SHN1, SHN2, SHN3, SHN4, SHN5, or MYB 96 are provided herein. Additionally, amino acid sequence alignments for the transcription factors, showing the amino acid sequences for each of these proteins from multiple plant species, are shown in FIGS. 25 and 26. Gene and protein sequences for these proteins, and methods for obtaining the genes or proteins, are also known and described in the art (see, e.g., references cited hereinabove). One of skill in the art will recognize that these gene or protein sequences known in the art and/or as described herein can be modified to make variant transcription factors, e.g., by making conservative substitutions at one or more amino acid residues. One of skill will also recognize that the known sequences (e.g., the alignments provided herein) provide guidance as to which amino acids may be varied to make a substantially identical transcription factor. For example, using the alignment provided in FIGS. 25 and 26, one of skill will recognize which amino acid residues are not highly conserved and thus can likely be changed without resulting in a significant effect on the function of the transcription factor. Similarly, one of skill can identify highly conserved domain that are conserved in all or almost all of the transcription factors and use this information in identifying variants for use in the invention.

[0219] 2. Promoters from Downstream Targets of the Transcription Factors that Regulate Wax and/or Cutin Production

[0220] In some embodiments, the polynucleotide encoding the transcription factor that regulates wax and/or cutin production is operably linked to a promoter that is a downstream target of the transcription factor. The promoter is heterologous to the polynucleotide encoding the transcription factor that regulates wax and/or cutin production (i.e., is not the native promoter associated with the transcription factor). A promoter is suitable for use with the transcription factor if expression of the promoter is induced, directly or indirectly, by the transcription factor to be expressed, and if the promoter is expressed in the plant at the desired location, e.g., in the leaf of the plant.

[0221] In some embodiments, the promoter is substantially identical (e.g., at least 50%, at least 55%, at least 60%, at least 65%, at least 70%, at least 75%, at least 80%, at least 85%, at least 90%, at least 91%, at least 92%, at least 93%, at least 94%, at least 95%, at least 96%, at least 97%, at least 98%, or at least 99% identical) to the native promoter of a gene that is a downstream target of the transcription factor. In some embodiments, the promoter is a CER1, CER2, CER3, CER4, CER5, CER6, CER10, WSD1, Mah1, WBC11, KCS1, KCS2, FATB, LACS1, LACS2, CYP864A, CYP86A7, CYP86A5, KCS10, or KCS5 promoter, or a variant thereof that is substantially identical to a native promoter. In some embodiments, the transcription factor is selected from SHN1, SHN2, SHN3, SHN4, SHN5, or MYB 96 and the promoter is substantially identical to a native promoter selected from CER1, CER2, CER3, CER4, CER5, CER6, CER10, WSD1, Mah1, WBC11, KCS1, KCS2, FATB, LACS1, LACS2, CYP864A, CYP86A7, CYP86A5, KCS10, or KCS5. Alternative promoters may also be used. For example, alternative promoters can be identified by coexpression analysis, e.g., using Atted II database and known promoters as bait; or by identifying functional motifs of interest in the promoters of candidate genes. Promoters from other genes that are induced by the transcription factor may also be used.

[0222] In some embodiments, the promoter comprises a subsequence of any one of SEQ ID NOs:60-79, e.g., the sequence form WBC11 or CER1, or a variant thereof. In some embodiments, the promoter comprises a subsequence comprising about 50 to about 1000 or more contiguous nucleotides of any one of SEQ ID NOs:60-79. In some embodiments, the promoter comprises a subsequence of any one of SEQ ID NOs:60-79 comprising 50 to 1000, 50 to 900, 50 to 800, 50 to 700, 50 to 600, 50 to 500, 50 to 400, 50 to 300, 50 to 200, 50 to 100; 75 to 1000, 75 to 900, 75 to 800, 75 to 700, 75 to 600, 75 to 500, 75 to 400, 75 to 300, 75 to 200; 100 to 1000, 100 to 900, 100 to 800, 100 to 700, 100 to 600, 100 to 500, 100 to 400, 100 to 300, or 100 to 200 contiguous nucleotides of the sequence.

[0223] Promoters that are downstream targets of the transcription factors described herein are also described in the art. See, for example, review of wax biosynthesis in plants and references cited therein (Schreiber, Trends Plant Sci., 2010; Kunst & Samuels, Curr. Opinion Plant Biol. 12:721-727, 2009; Samuels et al., Annu. Rev. Plant Biol. 59:683-707, 2008; Nawrath, 19:281-287, 2006; Kunst & Samuels, Progress in Lipid Res. 42:51-80, 2003; Lemieux, Trends in Plant Sci. 1:312, 1996). References describing wax mutants analyzed in Arabidopsis include Bourdenx et al., Plant Physiol 156, 29-45 (2011); Panikashvili et al. Mol Plant 3, 563-575 (2010); Weng, et al., Planta 231, 1089-1100 (2010); Lee et al. Plant J 60, 462-475 (2009); Li et al., Plant Physiol 148, 97-107 (2008); Greer et al., Plant Physiol 145, 653-667 (2007); Rowland et al., FEBS Lett 581, 3538-3544 (2007); Rowland et al., Plant Physiol 142, 866-877 (2006); Costaglioli et al., Biochim Biophys Acta 1734, 247-258 (2005); Sturaro et al., Plant Physiol 138, 478-489 (2005); Schnurr et al., Plant Cell 16, 629-642 (2004); Pighin et al., Science 306, 702-704 (2004); Bonaventure et al., Plant Cell 15, 1020-1033 (2003); Chen et al., Plant Cell 15, 1170-1185 (2003); Fiebig et al., Plant Cell 12, 2001-2008 (2000); and Millar et al., Plant Cell 11, 825-838 (1999). Wax biosynthetic pathways are also conserved among plants species (see, e.g., Wang et al., Plant Mol Biol 78, 275-288 (2011); Mao et al., Planta 235, 39-52 (2012); Yu et al., Planta 228, 675-685 (2008); Tacke et al., Plant J 8, 907-917 (1995); Islam et al., Plant Mol Biol 70, 443-456 (2009); Post-Beittenmiller Plant Physiol Bioch 36, 157-166 (1998); and Park et al., Plant Mol Biol 74, 91-103 (2010)).

[0224] D. Artificial Positive Feedback Loops

[0225] In a further aspect, the invention provides artificial positive feedback loops for regulating gene expression in plants. An APFL over-induces or increases lifetime expression of a particular transcription factor and its downstream pathway. Examples of such systems are described above for secondary wall deposition in fiber stems and for wax deposition. Illustrative examples for cell wall densification and wax deposition of the principle underlying this strategy are shown in FIGS. 27 and 28. A transcription factor suitable for use in an APFL typically plays a role in controlling expression of multiple components of a pathway of interest. A cell type-specific promoter where expression is driven by the transcription factor is used as the promoter in the APFL construct. The APFL is created by introducing an expression construct into a plant cell where the construct comprises a polynucleotide encoding a transcription factor of interest operably linked to the desired promoter. Upon expression of the native transcription factor, expression of downstream gene is induced along with expression of the introduced transcription factor encoded by the APFL construct.

[0226] Additional examples of biosynthetic pathways that can employ an APFL include lipid biosynthetic pathways. For example, it is known that lipid biosynthesis and accumulation in seeds and other tissues occurs in specific cell types and is regulated by transcription factors such as WRL1 (WRINKLED; At3g54320), LEC1 (At1g21970), or LEC2 (At1g28300). These transcription factors can thus be used to create an AFPL to increase the accumulation of lipids in a desired tissue such as seed. Other transcription factors and appropriate promoters for use in an APFL can also be identified for other biosynthetic pathways. Lipid biosynthesis pathways are discussed, e.g., in Ohlrogge & Browse, Plant Cell 7:957, 1995; Hildebrand, et al., Plant Lipids: Biology, Utilisation and Manipulation, 67-102 (2005); and Dyer & Mullen, Seed Sci. Res. 15:255-267 (2005).

[0227] Other biosynthetic pathways that may be engineered to create an APFL include the terpenoid pathway. For example, an APFL may be created to increase terpenoid indole alkaloid biosynthesis. Transcription factors that may be used for such an APFL include CrMYC2, ORCA2 or ORCA3. A nucleic acid encoding the transcription factor may be operably linked to an induced promoter such as pSTR, which controls the expression of the strictosidine synthase from catharanthus roseus. The terpenoid indole alkaloid pathway is known (see, e.g., Peebles, et al., Metab Eng 11: 76-86 (2009); Liu, et al., J Integr Plant Biol 49:961-974 (2007); Menke, et al., EMBO J 18:4455-4463 (1999), each of which references is incorporated by reference).

[0228] A further example of an APFL is one that is employed to increase artemisinin biosynthesis (sesquiterpene). An illustrative transcription factor that may be used for such an APFL is AaWRK1 (from Artemisia annua). A nucleic acid encoding the transcription factor may be operably linked to an induced promoter such as pADS, which controls the expression of the amorpha-4,11-diene synthase from Artemisia annua. This biosynthetic pathway is known (see, e.g., Ma, et al., Plant Cell Physiol 50:2146-2161 (2009), which is incorporated by reference).

[0229] Yet another example of an APFL is one that is employed to increase berberine (an alkaloid) biosynthesis. An illustrative transcription factor that may be used for such an APFL is CjWRK1 (from Coptis japonica). A nucleic acid encoding the transcription factor may be operably linked to an induced promoter such as pCYP719A1, which controls the expression of the canadine synthase from Coptis japonica. This biosynthetic pathway is known (see, e.g., Kato, et al., Plant Cell Physiol 488-18 (2007), which is incorporated by reference).

[0230] E. Genetic Background of Plants in which an Artificial Feedback Loop is Introduced

[0231] In some embodiments, the plant in which the polynucleotide encoding a transcription factor, linked to a promoter from a downstream gene where expression is driven by the transcription factor, as described herein is expressed is a wild-type (i.e., naturally occurring) plant. In some embodiments, the plant in which the polynucleotide encoding a transcription factor as described herein is expressed is a mutant plant. As used herein, a “mutant plant” includes a plant having any loss-of-function or gain-of-function mutation of any gene or genes of interest as well as a plant in which endogenous expression of any gene or genes of interest is suppressed or decreased using known methodology (e.g., by antisense, siRNA, microRNA, dsRNA, or sense suppression). For example, in some embodiments, levels of a gene expression product of a gene or gene of interest can be reduced using known technologies such as riboswitch techniques (see, e.g., U.S. Patent Application Publication Nos. US20100286082, and US20110245326.)

[0232] In some embodiments, the plant in which the polynucleotide encoding a transcription factor as described herein is expressed is a plant having spatially modified gene expression of a lignin biosynthesis enzyme and/or a xylan biosynthesis enzyme, as described above. In some embodiments, the plant has been modified to have a reduced level of expression of a lignin biosynthesis enzyme and/or a xylan biosynthesis enzyme at least in tissues other than xylem tissue, and further comprises an expression cassette comprising a polynucleotide encoding the lignin biosynthesis enzyme (e.g., PAL, C4H, 4CL, HCT, C3′H, or CCR1) and/or a xylan biosynthesis enzyme (e.g., IRX8, IRX14, IRX9, IRX7, IRX10, F8H, PARVUS, RWA1, RWA2, RWA3 or RWA4) operably linked to a heterologous vessel-specific promoter (e.g., pVND1, pVND2, pVND3, pVND4, pVND5, pVND6, pVND7, pVNI2, pREF4, or pRFR1).

[0233] F. Preparation of Recombinant Expression Vectors

[0234] Once the promoter sequence and the coding sequence for the gene of interest (e.g., lignin biosynthesis enzyme, xylan biosynthesis enzyme, or transcription factor regulating the production of secondary cell wall) are obtained, the sequences can be used to prepare an expression cassette for expressing the gene of interest in a transgenic plant. Typically, plant transformation vectors include one or more cloned plant coding sequences (genomic or cDNA) encoding a protein of interest, such as a transcription factor, under the transcriptional control of 5′ and 3′ regulatory sequences. Vectors also typically comprise a dominant selectable marker. In typical embodiments, such plant transformation vectors also contain a promoter of interest (e.g., a vessel-specific promoter as described herein or a promoter whose expression is regulated by a transcription factor regulating the production of secondary cell wall), a transcription initiation start site, an RNA processing signal (such as intron splice sites), a transcription termination site, and/or a polyadenylation signal.

[0235] The plant expression vectors may include RNA processing signals that may be positioned within, upstream or downstream of the coding sequence. In addition, the expression vectors may include regulatory sequences from the 3′-untranslated region of plant genes, e.g., a 3′ terminator region to increase mRNA stability of the mRNA, such as the PI-II terminator region of potato or the octopine or nopaline synthase 3′ terminator regions.

[0236] Plant expression vectors routinely also include dominant selectable marker genes to allow for the ready selection of transformants. Such genes include those encoding antibiotic resistance genes (e.g., resistance to hygromycin, kanamycin, bleomycin, G418, streptomycin or spectinomycin), herbicide resistance genes (e.g., phosphinothricin acetyltransferase), and genes encoding positive selection enzymes (e.g. mannose isomerase).

[0237] Once an expression cassette comprising a polynucleotide encoding the lignin biosynthesis enzyme, xylan biosynthesis enzyme, or transcription factor regulating the production of secondary cell wall and operably linked to a promoter as described herein has been constructed, standard techniques may be used to introduce the polynucleotide into a plant in order to modify gene expression. See, e.g., protocols described in Ammirato et al. (1984) Handbook of Plant Cell Culture—Crop Species. Macmillan Publ. Co. Shimamoto et al. (1989) Nature 338:274-276; Fromm et al. (1990) Bio/Technology 8:833-839; and Vasil et al. (1990) Bio/Technology 8:429-434.

[0238] Transformation and regeneration of plants is known in the art, and the selection of the most appropriate transformation technique will be determined by the practitioner. Suitable methods may include, but are not limited to: electroporation of plant protoplasts; liposome-mediated transformation; polyethylene glycol (PEG) mediated transformation; transformation using viruses; micro-injection of plant cells; micro-projectile bombardment of plant cells; vacuum infiltration; and Agrobacterium tumeficiens mediated transformation. Transformation means introducing a nucleotide sequence in a plant in a manner to cause stable or transient expression of the sequence. Examples of these methods in various plants include: U.S. Pat. Nos. 5,571,706; 5,677,175; 5,510,471; 5,750,386; 5,597,945; 5,589,615; 5,750,871; 5,268,526; 5,780,708; 5,538,880; 5,773,269; 5,736,369 and 5,610,042.

[0239] Following transformation, plants can be selected using a dominant selectable marker incorporated into the transformation vector. Typically, such a marker will confer antibiotic or herbicide resistance on the transformed plants or the ability to grow on a specific substrate, and selection of transformants can be accomplished by exposing the plants to appropriate concentrations of the antibiotic, herbicide, or substrate.

[0240] The polynucleotides coding for a lignin biosynthesis enzyme, xylan biosynthesis enzyme, or transcription factor regulating the production of secondary cell wall, as well as the polynucleotides comprising promoter sequences for vessel-specific promoters or promoters from downstream targets of a transcription factor regulating the production of secondary cell wall, can be obtained according to any method known in the art. Such methods can involve amplification reactions such as PCR and other hybridization-based reactions or can be directly synthesized.

[0241] G. Plants in which Gene Expression can be Modified

[0242] An expression cassette comprising a polynucleotide encoding the lignin biosynthesis enzyme, xylan biosynthesis enzyme, or transcription factor regulating the production of secondary cell wall and operably linked to a promoter, as described herein, can be expressed in various kinds of plants. The plant may be a monocotyledonous plant or a dicotyledonous plant. In some embodiments of the invention, the plant is a green field plant. In some embodiments, the plant is a gymnosperm or conifer.

[0243] In some embodiments, the plant is a plant that is suitable for generating biomass. Examples of suitable plants include, but are not limited to, Arabidopsis, poplar, eucalyptus, rice, corn, switchgrass, sorghum, millet, miscanthus, sugarcane, pine, alfalfa, wheat, soy, barley, turfgrass, tobacco, hemp, bamboo, rape, sunflower, willow, Jatropha, and Brachypodium.

[0244] In some embodiments, the plant into which the expression cassette is introduced is the same species of plant as the promoter and/or as the polynucleotide encoding lignin biosynthesis enzyme, xylan biosynthesis enzyme, or transcription factor (e.g., a vessel-specific promoter, lignin biosynthesis enzyme, xylan biosynthesis enzyme, and/or transcription factor from Arabidopsis is expressed in an Arabidopsis plant). In some embodiments, the plant into which the expression cassette is introduced is a different species of plant than the promoter and/or than the polynucleotide encoding lignin biosynthesis enzyme, xylan biosynthesis enzyme, or transcription factor (e.g., a vessel-specific promoter, lignin biosynthesis enzyme, xylan biosynthesis enzyme, and/or transcription factor from Arabidopsis is expressed in a poplar plant). See, e.g., McCarthy et al., Plant Cell Physiol. 51:1084-90 (2010); and Zhong et al., Plant Physiol. 152:1044-55 (2010).

[0245] H. Screening for Plants Having Modified Gene Expression

[0246] After transformed plants are selected, the plants or parts of the plants may be evaluated to determine whether the expression patterns of the gene or genes of interest have been modified, e.g., by evaluating the level of RNA or protein, by evaluating the lignin content, xylan content, and/or amount of secondary cell wall deposition in the plant or part of the plant, or by determining the amounts of soluble sugars that can be extracted from the plants. These analyses can be performed using any number of methods known in the art.

[0247] In some embodiments, plants are screened by evaluating the level of RNA or protein. Methods of measuring RNA expression are known in the art and include, for example, PCR, northern analysis, reverse-transcriptase polymerase chain reaction (RT-PCR), and microarrays. Methods of measuring protein levels are also known in the art and include, for example, mass spectroscopy or antibody-based techniques such as ELISA, Western blotting, flow cytometry, immunofluorescence, and immunohistochemistry.

[0248] In some embodiments, plants are screened by evaluating lignin content, xylan content, and/or amount of secondary cell wall deposition. Lignin content can be assessed, for example, by spectrophotometry, microscopy, klason lignin assays, acetyl-bromide reagent or by histochemical staining (e.g., with phloroglucinol). Xylan content can be assessed, for example, by immunohistochemistry (e.g., with LM10 monoclonal antibody). The amount of secondary cell wall deposition can be assessed, for example, by histochemical staining (e.g., phloroglucinol or Maule reagent) or enzymatic or chemical reaction (e.g., polysaccharide hydrolysis or TFA hydrolysis).

### IV. Methods of Using Plants Having Spatially Modified Gene Expression

[0249] Plants, parts of plants, or plant biomass material from plants having spatially modified gene expression of one of more of a lignin biosynthesis enzyme, xylan biosynthesis enzyme, and/or transcription factor that regulates secondary cell wall production can be used for a variety of methods. In some embodiments, the plants, parts of plants, or plant biomass material are used in a conversion reaction to generate an increased amount of bioenergy as compared to wild-type plants. For example, the plants, parts of plants, or plant biomass material can be used in a combustion reaction, gasification, pyrolysis, or polysaccharide hydrolysis (enzymatic or chemical). In some embodiments, the plants, parts of plants, or plant biomass material are used in a saccharification reaction, e.g., enzymatic saccharification, to generate an increased amount of soluble sugars as compared to wild-type plants. In some embodiments, the plants, parts of plants, or plant biomass material are used to increase biomass yield or simplify downstream processing for wood industries (such as paper, pulping, and construction) as compared to wild-type plants. In some embodiments, the plants, parts of plants, or plant biomass material are used to increase the quality of wood for construction purposes.

[0250] In some embodiments, the modification of cell wall (composition or content) are used to increase stem/stalk strength to reduce lodging of cereals (wheat, barley, corn . . . ) and seed loss.

[0251] Methods of conversion, for example biomass gasification, are known in the art. Briefly, in gasification plants or plant biomass material (e.g., leaves and stems) are ground into small particles and enter the gasifier along with a controlled amount of air or oxygen and steam. The heat and pressure of the reaction break apart the chemical bonds of the biomass, forming syngas, which is subsequently cleaned to remove impurities such as sulfur, mercury, particulates, and trace materials. Syngas can then be converted to products such as ethanol or other biofuels.

[0252] Methods of enzymatic saccharification are also known in the art. Briefly, plants or plant biomass material (e.g., leaves and stems) are optionally pre-treated with hot water or dilute acid, followed by enzymatic saccharification using a mixture of cellulose and beta-glucosidase in buffer and incubation of the plants or plant biomass material with the enzymatic mixture. Following incubation, the yield of the saccharification reaction can be readily determined by measuring the amount of reducing sugar released, using a standard method for sugar detection, e.g. the dinitrosalicylic acid method well known to those skilled in the art. Plants engineered in accordance with the invention provide a higher sugar yield as compared to wild-type plants.

### EXAMPLES

[0253] The following examples are provided to illustrate, but not limit the claimed invention.

### Example 1

### Reengineering Secondary Cell Wall Deposition in Plants

[0254] This study pooled two approaches for overcoming cell wall recalcitrance and filling up fiber cells with cell wall polymers without altering plant development. The first approach allowed the reduction of lignin except in the vessels, while the second approach increased cell wall deposition specifically in woody tissues. This strategy of combining approaches uses synthetic biology to fine-tune lignin biosynthesis and to create new feedback loops to reengineer the control of secondary cell wall deposition.

### Materials and Methods

### Construction of Plasmids

[0255] The protein-coding regions of the C4H (ref3) gene (AT2G30490), F5H (At4g36220), and CADc gene (AT3G19450) were amplified from Arabidopsis thaliana cDNA, and the 5′ upstream region of 2756 bp, which is from the initial site of translation for VND6 gene (At5g62380), was amplified as pVND6 from genomic DNA with appropriate primers (see Table 1).

TABLE 1
Primers used for plasmid construction and genotyping

| | |
|---|---|
| pVND6-F3- | 5′-cccgggtaccTCCTTTACGATGTTGTTATGGGTTA-3′ |
| KpnI | |
| pVND6-R3- | 5′-cccgactagtGTGTGCGAGACTTTGGATTTGATCTTTTTAATTTTA-3′ |
| SpeI | |
| FY100908- | 5′-ggggacaagtttgtacaaaaaagcaggcttcATGGACCTCCTCTTGCTGGA-3′ |
| C4h-GW-F | |
| FY100908- | 5′-ggggaccactttgtacaagaaagctgggtcACAGTTCCTTGGTTTCATAACG-3′ |
| C4h-GW-R | |
| DL-F5G3- | 5′- |
| At3g19450- | ggggacaagtttgtacaaaaaagcaggcttcATGGGAAGTGTAGAAGCAGGAGAA- |
| GW | 3′ |
| DL-R5G3- | 5′-ggggaccactttgtacaagaaagctgggtcGTTTGTAGTTGTTGCAGCCTCCTC-3′ |
| At3g19450- | |
| GW | |
| FY081508- | 5′-ggggacaagtttgtacaaaaaagcaggcttcATGGAGTCTT CTATATCACA A-3′ |
| F5h-l-GW-F | |
| FY081508- | 5′-ggggaccactttgtacaagaaagctgggtcAAGAGCACAGATGAGGCGCGT -3′ |
| F5h-l-GW-R | |
| ref3-2F1 | 5′-TTC CGT ATC ATG TTC GAT AG-3′ |
| ref3-2R1 | 5′-AAT GTC AAT TTC CCA AAA TC-3′ |
| per-pVND6F1 | 5′-CAAATTGCCACATTGCAGAA-3′ |
| per-REF3-R1 | 5′-CGACGAGATTACGGTGGTTGA-3′ |

[0256] The gateway fragment (Invitrogen) was introduced into pCAMBIA1390 and the VND6 promoter was cloned using KpnI-SpeI/AvrII sites, then the C4H and CADc genes were introduced into the expression vector through a gateway system to get the final expression vectors pCAMBIA1390-pVND6:C4H, pCAMBIA1390-pVND6:F5H, and pCAMBIA1390-pVND6:CADc.

### Plant Growth and Transformation

[0257] Arabidopsis plants were grown in soil at 22° C. with 8 hr of light daily (short-day condition) for 4-5 weeks and 16 hr of light daily (long-day condition) for 4-5 weeks. The expression vector pCAMBIA1390-pVND6:C4H, pCAMBIA1390-pVND6:F5H, or pCAMBIA1390-pVND6:CADc was introduced into Agrobacterium tumefaciens strain GV3101 by electroporation, and was used to transfer Arabidopsis f5h, cadc/d homozygote ref3-2 (c4h mutant) heterozygote, f5h homozygote and cadc/d homozygote mutant plants, respectively, using the floral dip method (Clough and Bent, 1998).

### Analysis of Genotype of Arabidopsis Plants

[0258] Seeds of ref3-2 heterozygote mutants were sowed, genomic DNA of the plants was extracted through the CTAB method, and genotypes were analyzed through PCR with primers ref3-2F1 and ref3-2R1 (see Table 1). PCR products were digested with HinfI. The expected PCR products are 188 bp and 106 bp fragments for wild type plants, and a 294 bp fragment for the ref3-2 homozygotes.

[0259] Transformants of pVND6:C4H were identified through PCR with primers per-pVND6F1 and per-REF3-R1. The PCR product is 238 bp for the transformants. The PCR reactions above were carried out by using DyNAzyme DNA polymerase (Finnzymes, USA).

RNA Isolation and cDNA Synthesis

[0260] Total RNA was isolated using an RNeasy Plant Mini Kit (Qiagen, Valencia, Calif.) from the leaves of Arabidopsis plants under short day condition for 4 weeks. cDNA was synthesized using the Transcriptor High Fidelity cDNA Synthesis Kit (Roche Applied Science, Indianapolis, Ind.).

### Microscopy Analysis

[0261] To investigate the lignin content and anatomy of the cells of the stem, transverse sections were prepared from the base of the stems of mutant, wild-type and transgenic lines (when the plants were 30-35 cm high for healthy plants, 15-20 cm for mutant plants). The stem base of mature plants was embedded in 7% agarose before sectioning to a thickness of 100 μm using a vibratome (Leica VT1000S). Sections were mounted in water and examined under bright field. Lignified cell walls were also visualized under UV illumination. Lignin is a UV absorber so lignified cell walls emitted blue autofluorescence under UV illumination. A 2% (w/v) solution of Phloroglucinol dissolved in a 2:1 mixture of ethanol and concentrated HCl was applied to the stem sections directly to detect all lignin (Adler, 1977). Stem sections were also stained with calcofluor, a specific dye for β-glucans such as cellulose to determine the general antomy of the cells (Mori, 1996). Fresh sections were immersed in 0.5% calcofluor for 5 minutes, followed by 2 water washes of 5 minutes each to remove any excess of unbound calcofluor. Sections were immediately observed using a fluorescent microscope (Leica DM4000B). Images were registered using a Leica DC500 camera.

### Preparation of Alcohol Insoluble Residue (AIR)

[0262] Stems of plants were collected, dried and grinded into powder, then alcohol insoluble residue (AIR) was prepared according to Goubet et al. (2009). Grinded powder of stem was mixed with 1 mL 95% Ethanol and incubated at 100° C. for 30 min. After centrifugation, the supernatant was removed and the pellets were washed with 1 mL 70% Ethanol for 2-3 times and dried completely.

### Lignin Measurement

[0263] 5 mg of AIR samples were analyzed for lignin assay through acetyl bromide methods (Fukushima, 2004). The AIR samples were mixed with 200 uL acetone bromide solution (25% v/v acetyl bromide in glacial acetic acid) in 2 mL Eppendorf tube with screw lids, shaking at 600 rpm in 50° C. for 2 hrs, then diluted to total volume of 1 mL with acetic acid. After centrifugation, 100 uL of supernatant was transferred to a new tube and mixed with 500 uL acetic acid, 300 uL 0.3M sodium hydroxide, and 100 uL hydroxylamine hydrochloride, respectively, then diluted to total volume of 2 mL with acetic acid. 360 uL of the solution was transferred to UV specific 96-well plates (Greiner, Monroe, N.C.) and absorbance at 280 nm was read. The percentage of acetyl bromide soluble lignin (% ABSL) was calculated based on published extinction coefficients (Fukushima, 2004; Foster, 2010).

### Saccharification and DNS Assay

[0264] 5 mg of AIR samples was pretreated with 170 uL of water, diluted alkaline (1% NaOH, 30 min at 30° C., 30 min at 100° C.) or diluted acid (1.2% H₂SO₄, 30 min at 30° C., 1 hr at 120° C.). HCl or NaOH was added for neutralization for the last pretreatments, then the samples were added with 8 uL 5 mg/mL tetracycline, 25 uL 1M citrate buffer pH 6.2, 2 uL of diluted enzyme mix (Novozyme enzymes NS50013 (cellulase) and NS50010 (beta-glucosidase), 1:10 and 1:100 dilutions in 0.1M citrate buffer pH 5.0, respectively), and diluted to a final volume of 500 ul with water. The samples were shaken at 850 rpm in 50° C. for 24 hr. After saccharification, sugar amounts were analyzed through DNS assay. Glucose of 0, 0.125, 0.25, 0.5, 0.75, 1 and 2 mg/mL in citrate buffer pH 5.0 were used as standards. DNS reagent was added to samples and standards, incubated in 95° C. for 10 min, then absorbance at 540 nm was read for the assay.

### Analysis of the Hemicellulose Compositions

[0265] Approximately 5 mg of AIR was hydrolyzed in 1 ml of 2 M TFA for 1 h at 120 C. TFA was removed by drying under vacuum. Monosaccharide composition was subsequently determined by HPAEC-PAD of hydrolyzed material using a PA20 column (Dionex, Sunnyvale, Calif.) as described previously (Obro, 2004; Christensen, 2010). Monosaccharide standards included L-Fuc, L-Rha, L-Ara, D-Gal, D-Glc, D-Xyl, D-GalA and D-GlcA, and were obtained from Sigma. For verification of the response factors, a standard calibration was performed before analysis of each batch of samples.

### Results

[0266] Characterization of Vessel Specific Promoter pVND6

[0267] Integrity of the vessels is required for good development of plants due to the importance of the vessel tissue in transporting water and nutrients to photosynthetic organs. The VND-type transcription factors have been characterized as master regulators for vessel formation, suggesting they would have a vessel restricted expression pattern (Kubo et al., 2005). In order to correlate the spatiotemporal expression of these transcription factors with lignin biosynthesis, the promoter pVND6 was used to complement CAD mutants (described in Sibout et al., 2005) (FIG. 20A). The redness disappearance of xylem and the restoration of the vessel integrity were the acceptance criteria to use this promoter.

[0268] In order to compare the strength of the promoter pVND6 to promoter pC4H, both promoters were used to complement an f5h mutant (Meyer et al., 1998). The activity of the promoters was compared by measuring the amount of sinapyl alcohol unit incorporated into the lignin using Maule staining as a readout (FIG. 20B). Cross-sections of stems from the lines expressing the F5H gene under the VND6 promoter showed a much lower redness after Maule staining than the one with pC4H. These results indicate that the accumulation of sinapyl alcohol in the lignin in pVND6::F5H lines was due to a lower and more restricted F5H activity as compared to pC4H::F5H lines, a finding which is in agreement with the cadc/d complementation described above (FIG. 20A).

### Restriction of Lignin Biosynthesis

[0269] The lignin biosynthetic pathway is well characterized and loss of function of any of several genes of the lignin biosynthesis pathway results to deleterious growth effect and sterility. Therefore, controlling the expression of one of these genes should give the opportunity to control the production of monolignols. We selected the C4H gene, an early gene in the lignin biosynthesis pathway, as a target gene to control the flux of the pathway to produce the monolignols. In order to control the expression of C4H, we used the ref3-2 mutant (Schilmiller et al., 2009) and transformed the heterozygote line, due to the sterility, with a binary vector containing the pVND6::C4H gene construct. Transformants were selected and genotyped for the homozygosity of the ref3-2 allele. Interestingly, ref3-2 homozygotes harboring the pVND6::C4H fragment, called “EngSCW1g” (engineered secondary cell wall 1^{st} generation), did not show a growth difference as compared to Col0 wild-type plants grown at the same time. These transformed plants were able to generate a large rosette and a tall stem and were fertile (FIG. 16A). However, leaves from the transformed plants were purpled due to anthocyanin accumulation only in the vessel, in contrast to wild-type leaves that turned completely purpled under high light. This result demonstrates the restricted activity of the pVND6 promoter as compared to pC4H.

[0270] Analysis of lignin content of EngSCW1g plants via an acetyl-bromide method showed that lignin content in senesced stem approached approximately ⅔ of the lignin content of Col0 stem plants grown at the same time under the same conditions. In order to verify the lignin distribution in the stem, cross-sections of approximates 15-20 cm old stems were analyzed using phloroglucinol and Maule staining methods. Cross-sections of the engineered lines showed a reduction of lignin staining in the interfascicular fibers as compared to wild-type plants expressing the C4H gene under the control of its native C4H promoter. In contrast to the homozygote ref3-2 mutant, xylem tissues of the EngCW1g plants exhibited strong phloroglucinol staining and no vessel collapse, similar to the wild-type plants (FIG. 15B and FIG. 21).

### Increase of Cell Wall Deposition

[0271] The transcriptional network controlling secondary cell wall deposition in vessels and fibers has already been well investigated. Secondary cell wall deposition is controlled by two independent networks, although these two networks lead to the activation of the same groups of downstream secondary wall biosynthetic genes to regulate the synthesis of cellulose, hemicellulose and lignin. Several groups have showed that overexpressing a secondary cell wall transcription factor with the constitutively active 35S promoter in Arabidopsis generates ectopic secondary cell wall and lignification everywhere, including in elongating cells and photosynthetic tissues, which as a result inhibits plant growth (Zhong et al., 2008; Mitsuda et al., 2005; Goicoechea et al., 2005). Interestingly, even with restrained development, the plants exhibited enhanced secondary cell wall thickness in fiber cells (Zhong et al., 2008), suggesting that increasing the expression of a secondary cell wall transcription factor could be a route to increase cell wall deposition (and therefore increase biomass density).

[0272] Accordingly, we overexpressed NST1 cDNA in the EngCW1g plant with an IRX8 promoter. Because IRX8 is a gene that is downstream of (i.e., under the control of) the NST1 transcription factor (Mitsuda et al., 2005; Zhong et al., 2010), this pIRX8::NST1 construct creates a positive feedback loop for overexpressing NST1 cDNA only in secondary cell wall tissues. EngCW1g plants were chosen for the transformation because the VND6 promoter is not a downstream target of NST1, and therefore the lignin biosynthesis under the control of pVND6 in EngCW1g should be disconnected from NST1 regulation. The generated plants, which were called “EngSCW2g” (engineered secondary cell wall 2^{nd} generation), did not exhibit a growth difference when compared to Col0 and EngSCW1 g plants grown at the same time. The EngSCW2g plants were able to generate a large rosette and tall stem and were fertile (FIG. 17A). Like EngSCW1g plants, leaves from the EngSCW2g lines were purpled due to anthocyanin accumulation only in the vessel, in contrast to wild-type leaves that turned completely purpled under high light. The verification of the expression of both NST1 genes (native and cDNA) was verified by semi-quantitative PCR and revealed that the native NST1 was expressed at the same level in wild-type, EngSCW1g, and EngSCW2g lines. However, only in the EngSCW2g lines was the expression of the new NST1 copy detected, resulting in a higher general expression level of the NST1 gene (native and cDNA) in the stem (FIG. 22).

[0273] In order to verify the effect of NST1 overexpression on cell wall deposition in stems, lignin distribution in the stem cross-sections of old stems was analyzed using a phloroglucinol staining method. Cross-sections of the EngSCW2g lines still showed a reduction of lignin staining in the interfascicular fibers as compared to wild-type, while xylem tissues exhibited strong phloroglucinol staining and no vessel collapse, similar to wild-type and EngSCW1g lines (FIGS. 15B and 17B). Cell wall thickening was analyzed via transmission electron microscopy (TEM) on cross-sections from the base of xxx cm old stems. Intense thickening of cell wall in EngSCW2g lines compared to wild-type was observed in fiber cells from interfascicular fibers and xylem but not in vessel (FIGS. 18 and 23), which is in agreement with the overexpression of the NST transcription factors (Zhong et al., 2008). In wild-type stem cross-sections, the usual 4 distinct layers (S1, S2 and S3 and the middle lamella) were observed, in contrast to EngSCW2g lines where additional layers with different intensity were observed, which almost fill up the entire cell space.

### Fine-Tuning Secondary Cell Wall Deposition for Bioenergy

[0274] Analyses of cell wall cross-sections from EngSCW2g plants with gold-labeled CBM revealed that the extra cell wall layers contained cellulose, suggesting that the amount of cellulose had been increased. In order to verify an enhancement of cellulose, a complete polysaccharide hydrolysis was performed using H₂SO₄ (Suilter et al 2008, Technical report NREL/TP-510-4218) on senesced stems from EngSCW2g. The amount of glucose and other sugar released from the stem cell wall was similar among wild type, EngSCW1g, and EngSCW2g lines. The amount of xylose and glucuronic acid was also increased, suggesting that hemicellulose deposition was also enhanced in these plants. The composition analysis of hemicellulose by trifluoroacetic acid (TFA) hydrolysis of mature stems from the EngSCW1g and EngSCW2g lines did not exhibit major differences as compared to wild-type plants grown at the same time (FIG. 24).

[0275] To analyze the saccharification efficiency of the EngSCW2g lines, 5 mg of ball-milled stems from EngSCW2g lines were subjected to two different mild pre-treatments, hot-water and dilute alkaline, followed by a saccharification kinetic. After each of the pre-treatments, glucose was released from the stem in presence of a cellulase cocktail much faster, and 2 to 3 times higher for EngSCW2g plants than for the control plants, when alkaline and hot-water pretreatments respectively were performed prior to a 120 hr saccharification (FIG. 19A-B).

[0276] Saccharification improvement was also observed with the EngSCW1g lines; for those plants, sugar hydrolyzed in the presence of the same amount of cellulase after hot water or dilute alkaline pre-treatments was 2.3 and 1.5 fold better than a control plant after hot water or dilute alkaline pre-treatment, respectively. The overexpression of the NST1 transcription factor in EngSCW2g lines increased cell wall deposition but did not reduce saccharification efficiency, which translated into an higher amount of glucose released by this line due to the increased polysaccharide content as compared to the parental EngSCW1g line.

Analysis of Additional Ref3-2 Mutant Plants that are Modified to Express C4H

[0277] Ref3-2 mutant plants were also engineered to express C4H using either promoter pREF4 or pRFR1. Mutant plants were modified to contain either pREF4::C4H or prFR1::C4H to express C4H. Plant growth and phenotype of engineered cell wall plant lines were analyzed. FIG. 29 shows photographs of the plants. Growth was restored in mutant plants transformed with either construct. Lignin distribution in the plants is shown in FIG. 30. The results show that lignin was produce in the vessels, but reduced in fibers in the engineered plants, which resulted in >35% reduction of the total lignin compared to wild type plants without affecting plant growth. FIG. 31 provides data showing the saccharification efficient of the engineered lines. These results show that the reduction of lignin in fibers greatly improved saccharification efficiency. Therefore, these results demonstrate that both promoters pREF4 and pRFR1 can be used to engineer plants with low lignin similarly to the “EngSCW1g” plants (ref3-2 complemented with pVND6::C4H construct) and be used as genetic background for the secondary cell wall positive feed back loop.

### Example 2

### Positive Feedback Loops Engineered in Arabidopsis (Dicot) and Brachypodium (Monocot)

[0278] FIG. 27 illustrates a cell wall deposition positive feed back loop. Cell wall densification is based on the creation of an artificial positive feedback loop to enhance the expression of fiber-specific transcription factor. It is created by the expression of a new copy of a fiber specific transcription factor (e.g., NST1) under the control of a downstream-induced promoter from xylan or cellulose biosynthesis. This approach is compatible with xylan and lignin engineering strategies.

[0279] FIG. 31A shows UV images of stem cross-sections from wildtype Arabidopsis (dicotyledon) and wildtype Arabidopsis genetically modified to contain a pCesA4::NST1 expression construct. The creation of a positive feedback loop with the secondary cell wall cellulose promoter (pCesA4) and the secondary cell wall transcription factor (NST1) enhanced secondary cell wall deposition in fiber cells.

[0280] FIG. 31B shows UV images of stem cross-sections from wildtype Brachypodium (monocotyledon) and wildtype Brachypodium genetically modified to contain a pAtIRX8::AtNST1 expression construct. The creation of a positive feedback loop with the secondary cell wall cellulose promoter (pAtIRX8) and the secondary cell wall transcription factor (AtNST1) enhanced secondary cell wall deposition in Brachypodium.

[0281] This example demonstrated that this pathway is conserved in both monocots and dicots and that positive feedback loop could be generated to enhance secondary cell wall deposition.

### Example 3

### Engineering a Xylan Biosynthesis Enzyme

[0282] Arabidopsis mutants irx7-1 (At2g28110, salk_{—}120296), irx8-1 (At5g54690, salk_{—}008642), irx9-1 (At2g37090, salk_{—}058238), irx9-2 (salk_{—}057033C), parvus (At1g19300, CS16279) were obtained from Arabidopsis Biological Resource Center. The wild-type IRX7, IRX8, IRX9, and PARVUS genes were cloned into Gateway entry clones and recombined into Gateway destination vectors with the pVND6 or pVND7 promoters as described above for the lignin biosynthesis genes.

[0283] The expression vector pCAMBIA1390-pVND6:IRX7, pCAMBIA1390-pVND7:IRX7, pCAMBIA1390-pVND6:IRX8, pCAMBIA1390-pVND7:IRX8, pCAMBIA1390-pVND6:IRX9, pCAMBIA1390-pVND7:IRX9, pCAMBIA1390-pVND6:PARVUS, pCAMBIA1390-pVND7:PARVUS were introduced into Agrobacterium tumefaciens strain GV3101 by electroporation. Constructs expressing IRX7, IRX8, IRX9, and PARVUS were used to transform Arabidopsis heterozygote mutant plants (irx7-1, irx8-1, irx9-1 and parvus, respectively) using the floral dip method (Clough and Bent, 1998). Constructs expressing IRX9 were also used to transform homozygous mutants of irx9-2.

[0284] Seeds of the transformed irx7, irx8, parvus, irx9-1, and irx9-2 plants were planted on growth medium supplemented with hygromycin. Hydromycin resistant plants were recovered and transferred to soil. The plants showed a healthy growth phenotype unlike the untransformed homozygous mutants, which were clearly affected in growth.

[0285] Transformed irx7, irx8, irx9-2, parvus, and irx9-1 mutants were selected. The recovered, transformed mutants were characterized by PCR to ensure their homozygous phenotype with respect to the original mutations, and to ensure the presence of the pVND6 or pVND7 driven transgenes. The growth of the plants was compared with that of wild type and homozygous mutants, and their content of xylan determined by sugar composition analysis of inflorescence stems. Lignin was determined by acetyl bromide method. The localization of xylan deposition was determined by immunofluorescence microscopy using LM10 antibody and deposition of lignin by microscopy and determination of autofluorescence under UV illumination and Phloroglucinol staining. Saccharification was determined as described above.

[0286] FIG. 33 provides data demonstrating that mutants in the IRX7, IRX8 or IRX9 genes exhibited strong growth reduction. Transformation of the mutants with constructs where the wild type version of the mutated gene was driven by pVND6 or pVND7 promoter restored the growth. Similar results were obtained with pVND6::IRX9 and pVND7::IRX7.

[0287] FIG. 34 provides data showing growth of offspring of four individual transformants made by transforming irx7 mutant with the pVND7::IRX7 construct. Growth was quantified by measuring rosette diameter. Two of the plant lines grew identically to wild type (Col0), while one plant line grew slightly better than the wildtype plant and for one plant, growth was only partially restored.

[0288] FIG. 35 provides data showing growth of offspring of two individual transformants made by transforming irx9 mutant with the pVND7::IRX9 construct. Growth was quantified by measuring rosette diameter. The transformed plant lines grew identically to wild type (Col0). Similar results were obtained with plants transformed with pVND6::IRX9.

[0289] FIG. 36 provides data showing an analysis of non-cellulosic monosaccharide composition of cell walls prepared from four individual transformants made by transforming irx7 mutant with the pVND7::IRX7 construct. All the transformants still exhibited the low xylan content of the original irx7 mutant in spite of the restored growth.

[0290] FIG. 37 provides data showing an analysis of non-cellulosic monosaccharide composition of cell walls prepared from offspring of four individual transformants made by transforming irx8 mutant with the pVND6::IRX8 construct. All the transformants still exhibited the low xylan content of the original irx8 mutant in spite of the restored growth.

[0291] FIG. 38 provides data showing an analysis of non-cellulosic monosaccharide composition of stem cell walls prepared from offspring of four individual transformants made by transforming irx9 mutant with the pVND7::IRX9 construct and two individual transformants with the pVND6::IRX9 construct. All the transformants still exhibited the low xylan content of the original irx9 mutant in spite of the restored growth.

[0292] FIG. 39 provides data showing a saccharification analysis of cell walls prepared from offspring of two individual transformants made by transforming irx9 mutant with the pVND6::IRX9 construct and three individual transformants made by transforming irx9 mutant with the pVND7::IRX9 construct. All the transformants exhibited improved saccharification similar to the original irx9 mutant in spite of the restored growth.

### Example 4

### Generation of Wax-APFL in Epidemic Cells and Conservation Across Species

[0293] Waxes are highly energetic and contain large amounts of long chain alkanes and fatty acids that have potential fuel applications. Therefore, using the wax-APFL to generate plants capable to produce and accumulate large amount of waxes in non-essential tissues such as pith and fiber in stems offer new opportunities generate bioenergy crops with high energy density that are also water use efficient.

[0294] FIG. 28 illustrates an artificial positive feed back loop for wax deposition.

[0295] This example employed Arabidopsis as a model plant to develop the wax-APFL to increase wax biosynthesis and accumulation in epidermis cells. Eight DNA constructs were designed to create a wax AFPL in epidermal cells, which produce some wax. These constructs were generated by using pAtCER1 or pAtWBC11 as promoters to express AtSHN1 (NP_{—}172988) from Arabidopsis and selected homologs OsSHN1 (NP_{—}001046226), BdSHN1 (XP_{—}003563662) or SmSHN1 (XP_{—}002969836) from Rice, Brachypodium and Selaginella respectively. All constructs were transferred individually to wildtype Arabidopsis using Agrobacterium transformation. For each wax-APFL, several transgenic plants were recovered.

[0296] In Arabidopsis, as in many plant species, wax biosynthesis occurs principally in epidermic cells from leaves and stems. It has also been reported by several studies that plants over-expressing SHN genes using constitutive or chemically induced-promoters resulted in shiny phenotype of the leaves or/and stem surfaces, which was attributed to modifications of wax deposition or/and composition (McNevin et al 1993; Broun et al 2004; Kannangara et al 2007; Shi et al. 2011). Visual analysis of the Arabidopsis plant transformed with the different constructs showed increased shininess of the leaves (FIG. 40).

[0297] Additional analyses are performed on homozygous lines, including composition analysis of leave and stem epidermal waxes. Plant development, additional assessment of shininess of leaf epidermis, chlorophyll leaching assays, wax accumulation and composition analysis, gene expression analysis and biological impact on drought stress and water losses are the primary criteria used to characterize the wax-APFL in plants. The chlorophyll leaching assays is a general assay to indentify modification of the cuticle permeability to ethanol and is performed by monitoring the chlorophyll extraction on intact leaves in presence of ethanol (Aharoni et al., Plant Cell 2004 supra; Seo et al, Plant Cell 2011, supra). Epicuticular wax accumulation and composition are analyzed after being extracted by short immersing of whole leaf or stem into chloroform containing some n-triacontane as standard. The general composition the extracts are pre-analyzed by TLC plates using hexane:ethyl-ether:acetic-acid at 90:7.5:1 solvent system and derivatized with N,Obis(trimethylsilyl)trifluoroacetamide):trimethylchlorosilane at 99:1 for GC/MS analysis (Aharoni et al. Plant Cell, 2004, supra; Kannangara et al., Plant Cell, 2007, supra). In order to evaluate the impact of enhanced wax deposition on plant water use efficiency, water loss assays are performed on detached leaves by monitoring weight losses. Finally, the impact of wax deposition modification on plant drought stress tolerance are performed by plant survival counts of 5-6 weeks old plants after 7-15 days dehydration period followed by 1 week of watering recovery period.

### Discussion

[0298] Modifying lignin content has always been a challenge in crops or trees, since the more severe the reduction is, the more biomass yields are affected. This reduction is also often associated with a loss of integrity of the vessel tissues that are responsible for water and nutrient transport and distribution from the root into the aboveground organs. Lignin is one of the main inhibitory factors for efficient enzymatic hydrolysis of plant cell wall polysaccharides. Therefore, our strategy focused on reducing lignin in most tissues except vessels (in order to maintain vessel integrity) and on the disconnection of lignin biosynthesis from key secondary cell wall transcription factor switches in order to manipulate the expression of the transcription factors without affecting lignin deposition.

[0299] Our strategy to reengineer secondary cell wall biosynthesis demonstrated that we can reduce the lignin content and increase cell wall thickening in woody tissues without altering plant growth. Replacing the promoter of a gene controlling an essential step in the lignin biosynthesis by another one with a more restricted spatiotemporal expression profile gives better control of the lignin deposition that silencing approaches alone. This fine-tuning avoids the reduction of lignin deposition in every tissue and allows keeping it in essential tissues such as vessels, in contrast to silencing approaches that affect every tissue and therefore limit the power of such a strategy. The use of the pVND6 promoter to control the activity of C4H allowed a partial disconnection of the lignin biosynthesis from the general transcription factor network controlling secondary cell wall deposition in fiber cells and permitted for the first time to increase polysaccharide deposition without over-lignification. In order to increase secondary cell wall deposition only in woody tissue with a self-induction, we generated an artificial positive feedback loop using the pIRX8 promoter to express a second copy of the master transcription factor NST1. This promoter is specifically active in tissue producing secondary cell wall and is already under the control of the NST1 transcription factor in fiber cells. Therefore, such a chimeric gene allowed the overexpression of NST1 by self-induction, increasing as well the expression of downstream target genes involved in polysaccharide biosynthesis. In addition, using a downstream promoter of NST1 to express a new copy of itself may have increased the time-dependent expression of the NST1 transcription factor, therefore increasing the time of secondary cell wall deposition in fiber cells, which consequently increases cell wall thickness.

[0300] To our knowledge, only one artificial negative feedback loop has been generated in plants to regulate a developmental process, and it corresponds to the delay of senescence (Gan and Amasino, Science 1995). This strategy corresponds to the expression of the IPT gene encoding for an isopentenyltransferase at the beginning of the senescencing process using an early senescence induced promoter (pSAG12) in order to produce cytokinin specifically at that stage. This hormone is known to repress senescencing processes and keep the plants photosynthetically active much longer (Gan and Amasino, Science 1995). Due to the conservation of the regulatory mechanism and gene network of the senescence processes across species, and in particular the delay of senescencing processes by the hormone cytokinin, this synthetic construct was transferred into various crops (grasses and dicots) and could improve biomass yields due to an increase life time of the plant (McCabe et al., 2001; Lin et al., Acta Botanica Sinica 2002, 44:1333-1338; Robson et al., 2004; Li et al., 2004; Swartzberg et al., 2006; Calderini et al., 2007; Li et al., Plant Physiology 2010; and Chen et al., Molecular Breeding 2001).

[0301] Secondary cell wall biosynthesis falls in the same category of conserved regulatory networks, since this biological process is well conserved within vascular plants (Zhong et al., 2010). For example, transcriptional networks and genes involved in secondary cell wall biosynthesis are well conserved. The conservation of this network allowed us the utilization of the model plant Arabidopsis, allowing rapid testing and robustness of this approach. Because increased polysaccharide content has multiple applications from bioenergy to the paper industry, including forage crops, the transferability of this strategy need to be versatile. The approach described herein should be compatible and rapidly transferable from model species to bioenergy crops (dicots and monocots). It has previously been shown that overexpressing secondary cell wall transcription factors across species results in similar phenotypes and functions, suggesting that promoter regulatory elements are also well conserved. See, e.g., Shen et al., 2009 Bioenerg. Res 2:217-232; Zhong et al., 2010 Plant Physiol 152:1044-1055; Goicoechea et al 2005 Plant J 43:553-567; Franke et al., 2000, Plant J. 22:223-234. Therefore, the genome sequence of the target crop should not be required and the cassette promoter (e.g., pIRX5) and the transcription factor (e.g., NST1) from another species, such as Arabidopsis or a crop-related species, could be used to transform the target plant.

[0302] In contrast to yeast, E. coli, physcomitrella, and a few other species, promoter replacement by in vivo recombination in plants still has to be developed; therefore, in order to manipulate tissue specific lignin deposition, mutants are required. Natural loss of function mutants in essential genes in the lignin biosynthetic pathway are poorly available in crops due to the deleterious effects of mutations. In addition, tissue/cell specific gene expression inhibition has not yet been developed in plants. Therefore, general silencing strategies are regularly used to modify gene expression in order to reduce enzymatic activity in crops, which at least requires EST sequences of genes involved in the targeted biosynthesis pathway. One concern with the lignin biosynthesis pathway is that compromises between the gene repression level, plant health, and desired phenotype are often conflicting. For example, the improvement in saccharification by the repression of genes involved in the monolignol biosynthesis very often affects vessel integrity, therefore affecting water and nutrient transport and consequently plant growth. In order to transfer the presented technology to crops, the degeneracy of the genetic code (flexibility of the codon usage) could be used to generate silent resistant lignin genes that would be expressed with a vessel specific promoter from Arabidopsis or related species of the target crop together with a silencing construct to reduce or eliminate the expression of the corresponding native gene. For example, expressing in poplar a different 4CL encoding sequence with a vessel specific promoter such as VND6 would restore the growth and biomass yield of a 4CL antisense lines (Kitin et al., 2010; Voelker et al., 2010) and retain good saccharification efficiency. Alternatively, strategies that could bypass the defective enzymatic steps could be exploited. For example, the SmF5H gene from Selaginella could be expressed with a vessel specific promoter in a C3H RNAi-expressing poplar to restore the integrity of vessel and normal plant growth (Coleman et al., 2008a, 2008b). This SmF5H gene was recently shown in Arabidopsis to be able to restore the growth of HCT and C3H deficient mutants (Li et al., 2010 Plant Cell 22:1620-1632) and lignin mutants lacking the ability to produce p-coumaroyl shikimate and to meta-hydroxylate the p-coumaroyl shikimate respectively, which are essential steps in the lignin biosynthesis (Weng et al 2010). Similarly to this SmF5H strategy, both enzymatic steps converting phenylalanine into p-coumaric acid could be bypassed by using a tyrosine ammonia lyase (TAL) gene that converts tyrosine into p-hydroxycoumaric acid.

[0303] In summary, we have demonstrated that two approaches, one to increase cell biomass density and one to restrict lignin biosynthesis into essential tissue containing the vessels, were compatible and allowed the generation of healthy plants with a large amount of non-recalcitrant cell wall, allowing efficient enzymatic conversion into fermentable sugar without severe pre-treatments. These approaches open new doors for crop optimization and should benefit the lignocellulosic biofuel, paper and forage industries.

### REFERENCES

[0304] Anders, N., Wilkinson, M. D., Lovegrove, A., Freeman, J., Tryfona, T., Pellny, T. K., Weimar, T., Mortimer, J. C., Stott, K., Baker, J. M., Defoin-Platel, M., Shewry, P. R., Dupree, P., and Mitchell, R. A. (2012). Glycosyl transferases in family 61 mediate arabinofuranosyl transfer onto xylan in grasses. Proc Natl Acad Sci USA 109, 989-993
[0305] Brown D, Wightman R, Zhang Z, Gomez Ivan Atanassov L D, Bukowski J P, Tryfona T, McQueen-Mason S J, Dupree P, Turner S (2011) Arabidopsis genes IRREGULAR XYLEM (IRX15) and IRX15L encode DUF579 containing proteins that are essential for normal xylan deposition in the secondary cell wall. Plant J
[0306] Brown D M, Zhang, Z. N., Stephens, E., Dupree, P. and Turner, S. R. (2009) Characterization of IRX10 and IRX10-like reveals an essential role in glucuronoxylan biosynthesis in Arabidopsis. Plant J 57: 732-746
[0307] Cantarel B L, Coutinho P M, Rancurel C, Bernard T, Lombard V, Henrissat B (2009) The Carbohydrate-Active EnZymes database (CAZy): an expert resource for Glycogenomics. Nucleic Acids Res 37: D233-238
[0308] Gille, S., De Souza, A., Xiong, G., Benz, M., Cheng, K., Schultink, A., Reca, I. B., and Pauly, M. (2011). O-Acetylation of Arabidopsis Hemicellulose Xyloglucan Requires AXY4 or AXY4L, Proteins with a TBL and DUF231 Domain. Plant Cell 23, 4041-4053.
[0309] Lee C, Teng Q, Huang W, Zhong R, Ye Z H (2009) Down-regulation of PoGT47C expression in poplar results in a reduced glucuronoxylan content and an increased wood digestibility by cellulase. Plant Cell Physiol 50: 1075-1089
[0310] Lee C, Teng Q, Huang W, Zhong R, Ye Z H (2009) The F8H glycosyltransferase is a functional paralog of FRA8 involved in glucuronoxylan biosynthesis in Arabidopsis. Plant Cell Physiol 50: 812-827
[0311] Liepman A H, Wightman R, Geshi N, Turner S R, Scheller H V (2010) Arabidopsis—a powerful model system for plant cell wall research. Plant J 61: 1107-1121
[0312] Manabe Y, Nafisi M, Verhertbruggen Y, Orfila C, Gille S, Rautengarten C, Cherk C, Marcus S, Somerville S, Pauly M, Knox J P, Sakuragi Y, Scheller H V (2011) Loss-of-Function Mutation of REDUCED WALL ACETYLATION 2 in Arabidopsis Leads to Reduced Cell Wall Acetylation and Increased Resistance to Botrytis cinerea. Plant Physiol
[0313] Mortimer J C, Miles G P, Brown D M, Zhang Z, Segura M P, Weimar T, Yu X, Seffen K A, Stephens E, Turner S R, Dupree P (2010) Absence of branches from xylan in Arabidopsis gux mutants reveals potential for simplification of lignocellulosic biomass. Proc Natl Acad Sci USA 107: 17409-17414
[0314] Oikawa A, Joshi H J, Rennie E A, Ebert B, Manisseri C, Heazlewood J L, Scheller H V (2010) An integrative approach to the identification of Arabidopsis and rice genes involved in xylan and secondary wall development. PLoS One 5: e15481
[0315] Pena M J, Zhong R, Zhou G K, Richardson E A, O'Neill M A, Darvill A G, York W S, Ye Z H (2007) Arabidopsis irregular xylem8 and irregular xylem9: implications for the complexity of glucuronoxylan biosynthesis. Plant Cell 19: 549-563
[0316] Persson S, Caffall K H, Freshour G, Hilley M T, Bauer S, Poindexter P, Hahn M G, Mohnen D, Somerville C (2007) The Arabidopsis irregular xylem8 mutant is deficient in glucuronoxylan and homogalacturonan, which are essential for secondary cell wall integrity. Plant Cell 19: 237-255
[0317] Scheller H V, Manabe Y, Verhertbruggen Y, Gille S, Nafisi M, Rennie E, Oikawa A, Htwe S, Ebert B, Orfila C, Logue D, Knox P, Pauly M, Sakuragi Y (2010) Homologs of Cryptococcus Cas1p are required for Glycan Acetylation in Plants and Function Upstream of the Acetyltransferases. Glycobiology 20: 195
[0318] Scheller H V, Ulvskov P (2010) Hemicelluloses. Annu Rev Plant Biol 61: 263-289
[0319] Wu A M, Hornblad E, Voxeur A, Gerber L, Rihouey C, Lerouge P, Marchant A (2010) Analysis of the Arabidopsis IRX9/IRX9-L and IRX14/IRX14-L pairs of glycosyltransferase genes reveals critical contributions to biosynthesis of the hemicellulose glucuronoxylan. Plant Physiol 153: 542-554
[0320] Zhou G K, Zhong R, Himmelsbach D S, McPhail B T, Ye Z H (2007) Molecular characterization of PoGT8D and PoGT43B, two secondary wall-associated glycosyltransferases in poplar. Plant Cell Physiol 48: 689-699
[0321] Zhou G K, Zhong R, Richardson E A, Morrison W H, 3rd, Nairn C J, Wood-Jones A, Ye Z H (2006) The poplar glycosyltransferase GT47C is functionally conserved with Arabidopsis Fragile fiber8. Plant Cell Physiol 47: 1229-1240

[0322] It is understood that the examples and embodiments described herein are for illustrative purposes only and that various modifications or changes in light thereof will be suggested to persons skilled in the art and are to be included within the spirit and purview of this application and scope of the appended claims. All publications, patents, accession numbers, and patent applications cited herein are hereby incorporated by reference in their entirety for all purposes.

### Illustrative Genes Involved in Wax/Cutin Biosynthesis: Including Accession Numbers and Synonymous Gene Designations.

[0323] AtCER1: At1g02205: Aldehyde decarbonylase
AtCER2: VC2: At4g24510: BAHD-type acyl-transferase
AtCER3: WAX2: At5g57800: Sterol desaturase
AtCER4: FAR3: At4g33790: Fatty acyl-CoA reductase
AtCER5: WBC12: ABCG12: At1g51500: ABC transporter
AtCER6: CUT1: KCS6: At1g68530: Very long chain fatty acid condensing enzyme
AtCER10: ECR: At3g55360: Enoyl-CoA reductase
AtWSD1: At5g37300: Wax ester synthase
AtMAH1: CYP96A15: At1g57750: Mid Chain alkane hydrolase
AtWBC11: ABCG11: DSO: COF1: At1g17840: ABC transporter
AtKCS1: At1g01120: Very long chain fatty acid condensing enzyme
AtKCS2: DAISY: At1g04220: Very long chain fatty acid condensing enzyme
AtFATB: At1g08510: Acyl Carrier
AtLACS1: At2g47240: Long chain acyl-CoA synthase
AtLACS2: At1g49430: Long chain acyl-CoA synthase
AtCYP86A4: At1g01600: Cytochrome P450-dependent fatty acid hydroxylase
AtCYP86A7: At1g63710: Cytochrome P450-dependent fatty acid hydroxylase
AtLCR: CYP86A5: At2g45970: Cytochrome P450-dependent fatty acid hydroxylase
AtKCS10: FDH: At2g26250: Very long chain fatty acid condensing enzyme
AtCER60: KCS5: At1g25450: Very long chain fatty acid condensing enzyme

ILLUSTRATIVE SEQUENCES

SEQ ID NO: 1
Arabidopsis thaliana PAL1 nucleic acid (At2g37040) NM_129260
atggagattaacggggcacacaagagcaacggaggaggagtggacgctatgttatgcggcggagacatcaagacaaagaacatgg
tgatcaacgcggaggatcctctcaactggggagctgcagcggagcaaatgaaaggtagccatttggatgaagtgaagagaatggttg
ctgagtttaggaagccagttgtgaatcttggtggtgagactctgaccattggacaagtggctgcgatctcaactattggtaacagtgtgaa
ggtggagctatcggagacagctagagccggtgtgaatgctagtagtgattgggttatggagagtatgaacaaaggcactgatagttat
ggtgttactactggttttggtgctacttctcatcggagaaccaaaaacggtgtcgcacttcagaaggaacttattagattccttaacgccgg
aatattcggaagcacgaaagaaacaagccacacattgccacactccgccacaagagccgccatgcttgtacgaatcaacactctcctc
caaggattttccggtatccgatttgagattctcgaagcaattaccagtttcctcaacaacaacatcactccatctctccccctccgtggtac
aatcaccgcctccggagatctcgttcctctctcctacatcgccggacttctcaccggtcgtcccaattccaaagctactggtcccaacgg
tgaagctttaacagcagaggaagctttcaaattagcaggaatcagctccggattctttgatctccagcctaaggaaggtctcgcgctagt
caatggcacggcggttggatctggaatggcgtcaatggtgttattcgaaacgaatgttctctctgttttggctgagattttgtcggcggtttt
cgcagaggtgatgagtggtaagcctgagttcaccgatcatctcactcacagacttaaacatcatcccggtcaaatcgaagcggcggcg
ataatggagcatatcctcgacggaagctcgtacatgaaattagctcagaagcttcacgagatggatccgttacagaaacctaaacaaga
tcgttacgctcttcgtacttctcctcaatggttaggtcctcaaatcgaagtgatccgttacgcaacgaaatcgatcgagcgtgagattaact
ccgtcaacgataatccgttgatcgatgtttcgaggaacaaggcgattcacggtggtaacttccaaggaacaccaatcggagtttcaatg
gataacacgagattggcgatagcagcgattggtaaactcatgtttgctcaattctcagagcttgtgaatgatttctacaacaatggtttacc
ctcgaatctaaccgcttcgaggaatccaagtttggattatggattcaagggagctgagattgcaatggcttcttattgttcagagcttcaat
acttagctaatcctgtgactagccatgttcaatcagcagagcaacataaccaagatgtcaactctttgggactaatctcgtctcgcaaaac
ttctgaagctgttgatattctcaagcttatgtcaacaacgttcctcgttgcgatttgtcaagctgtggatttgagacatttggaggagaatttg
agacagactgtgaagaacactgtctctcaagtggcgaagaaagttcttactactggagtcaatggtgagcttcatccttctcgcttctgcg
aaaaggatttactcaaagttgtagaccgtgaacaagtctacacatacgcggatgatccttgtagcgcaacgtacccgttgattcagaagc
tgagacaagttattgttgaccatgattgatcaatggtgagagtgagaagaatgcagtgacttcaatcttccataagattggagctttcgag
gaggagcttaaggcagtgctaccgaaagaagtggaagcagcaagagcagcctacgataacggaacatcggctatcccgaacagga
tcaaggaatgtaggtcgtatccattgtatagattcgtgagggaagagcttggaacagagcttttgaccggagagaaagtgacgtcgcct
ggagaagagttcgacaaggttttcacggcgatttgtgaaggtaaaatcattgatccgatgatggaatgtctcaacgagtggaacggagc
tcccattccaatatgttaa
SEQ ID NO: 2
Arabidopsis thaliana PAL1 protein (At2g37040) NP_181241
MEINGAHKSNGGGVDAMLCGGDIKTKNMVINAEDPLNWGAAAEQMKGSHLDEVK
RMVAEFRKPVVNLGGETLTIGQVAAISTIGNSVKVELSETARAGVNASSDWVMESM
NKGTDSYGVTTGFGATSHRRTKNGVALQKELIRFLNAGIFGSTKETSHTLPHSATRA
AMLVRINTLLQGFSGIRFEILEAITSFLNNNITPSLPLRGTITASGDLVPLSYIAGLLTGR
PNSKATGPNGEALTAEEAFKLAGISSGFFDLQPKEGLALVNGTAVGSGMASMVLFET
NVLSVLAEILSAVFAEVMSGKPEFTDHLTHRLKHHPGQIEAAAIMEHILDGSSYMKL
AQKLHEMDPLQKPKQDRYALRTSPQWLGPQIEVIRYATKSIEREINSVNDNPLIDVSR
NKAIHGGNFQGTPIGVSMDNTRLAIAAIGKLMFAQFSELVNDFYNNGLPSNLTASRN
PSLDYGFKGAEIAMASYCSELQYLANPVTSHVQSAEQHNQDVNSLGLISSRKTSEAV
DILKLMSTTFLVAICQAVDLRHLEENLRQTVKNTVSQVAKKVLTTGVNGELHPSRFC
EKDLLKVVDREQVYTYADDPCSATYPLIQKLRQVIVDHALINGESEKNAVTSIFHKIG
AFEEELKAVLPKEVEAARAAYDNGTSAIPNRIKECRSYPLYRFVREELGTELLTGEKV
TSPGEEFDKVFTAICEGKIIDPMMECLNEWNGAPIPIC
SEQ ID NO: 3
Arabidopsis thaliana C4H nucleic acid (At2g30490) NM_128601
atggacctcctcttgctggagaagtctttaatcgccgtcttcgtggcggtgattctcgccacggtgatttcaaagctccgcggcaagaaat
tgaagctacctccaggtcctataccaattccgatcttcggaaactggcttcaagtcggagatgatctcaaccaccgtaatctcgtcgatta
cgctaagaaattcggcgatctcttcctcctccgtatgggtcagcgaaacctagtcgtcgtctcctcaccggatctaacaaaggaagtgct
cctcactcaaggcgttgagtttggatccagaacgagaaacgtcgtgttcgacattttcaccgggaaaggtcaagatatggtgttcactgtt
tacggcgagcattggaggaagatgagaagaatcatgacggttcctttcttcaccaacaaagttgttcaacagaatcgtgaaggttggga
gtttgaagcagctagtgttgttgaagatgttaagaagaatccagattctgctacgaaaggaatcgtgttgaggaaacgtttgcaattgatg
atgtataacaatatgttccgtatcatgttcgatagaagatttgagagtgaggatgatcctcttttccttaggcttaaggctttgaatggtgaga
gaagtcgattagctcagagctttgagtataactatggagatttcattcctatccttagaccattcctcagaggctatttgaagatttgtcaag
atgtgaaagatcgaagaatcgctcttttcaagaagtactttgttgatgagaggaagcaaattgcgagttctaagcctacaggtagtgaag
gattgaaatgtgccattgatcacatccttgaagctgagcagaagggagaaatcaacgaggacaatgttctttacatcgtcgagaacatc
aatgtcgccgcgattgagacaacattgtggtctatcgagtggggaattgcagagctagtgaaccatcctgaaatccagagtaagctaag
gaacgaactcgacacagttcttggaccgggtgtgcaagtcaccgagcctgatcttcacaaacttccataccttcaagctgtggttaagg
agactcttcgtctgagaatggcgattcctctcctcgtgcctcacatgaacctccatgatgcgaagctcgctggctacgatatcccagcag
aaagcaaaatccttgttaatgcttggtggctagcaaacaaccccaacagctggaagaagcctgaagagtttagaccagagaggttcttt
gaagaagaatcgcacgtggaagctaacggtaatgacttcaggtatgtgccatttggtgttggacgtcgaagctgtcccgggattatattg
gcattgcctattttggggatcaccattggtaggatggtccagaacttcgagcttcttcctcctccaggacagtctaaagtggatactagtg
agaaaggtggacaattcagcttgcacatccttaaccactccataatcgttatgaaaccaaggaactgttaa
SEQ ID NO: 4
Arabidopsis thaliana C4H protein (At2g30490) NP_180607
MDLLLLEKSLIAVFVAVILATVISKLRGKKLKLPPGPIPIPIFGNWLQVGDDLNHRNLV
DYAKKFGDLFLLRMGQRNLVVVSSPDLTKEVLLTQGVEFGSRTRNVVFDIFTGKGQ
DMVFTVYGEHWRKMRRIMTVPFFTNKVVQQNREGWEFEAASVVEDVKKNPDSAT
KGIVLRKRLQLMMYNNMFRIMFDRRFESEDDPLFLRLKALNGERSRLAQSFEYNYG
DFIPILRPFLRGYLKICQDVKDRRIALFKKYFVDERKQIASSKPTGSEGLKCAIDHILEA
EQKGEINEDNVLYIVENINVAAIETTLWSIEWGIAELVNHPEIQSKLRNELDTVLGPGV
QVTEPDLHKLPYLQAVVKETLRLRMAIPLLVPHMNLHDAKLAGYDIPAESKILVNA
WWLANNPNSWKKPEEFRPERFFEEESHVEANGNDFRYVPFGVGRRSCPGIILALPILG
ITIGRMVQNFELLPPPGQSKVDTSEKGGQFSLHILNHSIIVMKPRNC
SEQ ID NO: 5
Arabidopsis thaliana 4CL2 nucleic acid (At3g21240) NM_113019
atgacgacacaagatgtgatagtcaatgatcagaatgatcagaaacagtgtagtaatgacgtcattttccgatcgagattgcctgatatat
acatccctaaccacctcccactccacgactacatcttcgaaaatatctcagagttcgccgctaagccatgcttgatcaacggtcccaccg
gcgaagtatacacctacgccgatgtccacgtaacatctcggaaactcgccgccggtcttcataacctcggcgtgaagcaacacgacgt
tgtaatgatcctcctcccgaactctcctgaagtagtcctcactttccttgccgcctccttcatcggcgcaatcaccacctccgcgaacccg
ttcttcactccggcggagatttctaaacaagccaaagcctccgcggcgaaactcatcgtcactcaatcccgttacgtcgataaaatcaag
aacctccaaaacgacggcgttttgatcgtcaccaccgactccgacgccatccccgaaaactgcctccgtttctccgagttaactcagtc
cgaagaaccacgagtggactcaataccggagaagatttcgccagaagacgtcgtggcgcttcctttctcatccggcacgacgggtctc
cccaaaggagtgatgctaacacacaaaggtctagtcacgagcgtggcgcagcaagtcgacggcgagaatccgaatctttacttcaac
agagacgacgtgatcctctgtgtcttgcctatgttccatatatacgctctcaactccatcatgctctgtagtctcagagttggtgccacgatc
ttgataatgcctaagttcgaaatcactctcttgttagagcagatacaaaggtgtaaagtcacggtggctatggtcgtgccaccgatcgtttt
agctatcgcgaagtcgccggagacggagaagtatgatctgagctcggttaggatggttaagtctggagcagctcctcttggtaaggag
cttgaagatgctattagtgctaagtttcctaacgccaagcttggtcagggctatgggatgacagaagcaggtccggtgctagcaatgtc
gttagggtttgctaaagagccgtttccagtgaagtcaggagcatgtggtacggtggtgaggaacgccgagatgaagatacttgatcca
gacacaggagattctttgcctaggaacaaacccggcgaaatatgcatccgtggcaaccaaatcatgaaaggctatctcaatgacccctt
ggccacggcatcgacgatcgataaagatggttggcttcacactggagacgtcggatttatcgatgatgacgacgagcttttcattgtgg
atagattgaaagaactcatcaagtacaaaggatttcaagtggctccagctgagctagagtctctcctcataggtcatccagaaatcaatg
atgttgctgtcgtcgccatgaaggaagaagatgctggtgaggttcctgttgcgtttgtggtgagatcgaaagattcaaatatatccgaag
atgaaatcaagcaattcgtgtcaaaacaggttgtgttttataagagaatcaacaaagtgttcttcactgactctattcctaaagctccatcag
ggaagatattgaggaaggatctaagagcaagactagcaaatggattaatgaactag
SEQ ID NO: 6
Arabidopsis thaliana 4CL2 protein (At3g21240) NP_188761
MTTQDVIVNDQNDQKQCSNDVIFRSRLPDIYIPNHLPLHDYIFENISEFAAKPCLINGP
TGEVYTYADVHVTSRKLAAGLHNLGVKQHDVVMILLPNSPEVVLTFLAASFIGAITT
SANPFFTPAEISKQAKASAAKLIVTQSRYVDKIKNLQNDGVLIVTTDSDAIPENCLRFS
ELTQSEEPRVDSIPEKISPEDVVALPFSSGTTGLPKGVMLTHKGLVTSVAQQVDGENP
NLYFNRDDVILCVLPMFHIYALNSIMLCSLRVGATILIMPKFEITLLLEQIQRCKVTVA
MVVPPIVLAIAKSPETEKYDLSSVRMVKSGAAPLGKELEDAISAKFPNAKLGQGYGM
TEAGPVLAMSLGFAKEPFPVKSGACGTVVRNAEMKILDPDTGDSLPRNKPGEICIRG
NQIMKGYLNDPLATASTIDKDGWLHTGDVGFIDDDDELFIVDRLKELIKYKGFQVAP
AELESLLIGHPEINDVAVVAMKEEDAGEVPVAFVVRSKDSNISEDEIKQFVSKQVVFY
KRINKVFFTDSIPKAPSGKILRKDLRARLANGLMN
SEQ ID NO: 7
Arabidopsis thaliana HCT nucleic acid (At5g48930) NM_124270
atgaaaattaacatcagagattccaccatggtccggcctgccaccgagacaccaatcactaatctttggaactccaacgtcgaccttgtc
atccccagattccatacccctagtgtctacttctacagacccaccggcgcttccaatttctttgaccctcaggtcatgaaggaagctctttc
caaagcccttgtccctttttaccctatggctggtcgcttgaagagagacgatgatggtcgtattgagatcgattgtaacggtgctggtgttc
tcttcgttgtggctgatactccttctgttatcgatgattttggtgattttgctcctacccttaatctccgtcagcttattcccgaagttgatcactc
cgctggcattcactctttcccgcttctcgttttgcaggtgactttctttaaatgtgggggagcttcacttggggttgggatgcaacatcacgc
ggcagatggtttctctggtcttcattttatcaacacatggtctgatatggctcgtggtcttgacctaaccattccacctttcattgatcgaaca
ctcctccgagctagggacccgccacagcctgcttttcatcatgttgaatatcagcctgcaccaagtatgaagatacctcttgatccgtcta
aatcaggacctgagaataccactgtctctatattcaaattaacacgagaccagcttgttgctcttaaggcgaaatccaaggaggatggga
acactgtcagctacagctcatacgagatgttggcagggcatgtgtggagatcagtgggaaaggcgcgagggcttccaaacgaccaa
gagacgaaactgtacattgcaactgatggaaggtctagactacgtccgcagctgcctcctggttactttgggaatgtgatattcactgca
acaccattggctgttgcaggggatttgttatctaagccaacatggtatgctgcaggacagattcatgatttcttggttcgtatggatgataa
ctatctgaggtcagctcttgactacctggagatgcagcctgatctgtcagcccttgtccgcggtgcacatacctacaagtgcccaaatttg
ggaatcacaagctgggttagattacctatttatgatgcagactttggttggggtcgtcctatctttatgggacctggtggaattccatacga
gggtttgtcttttgtgctaccaagtcctactaatgatggcagcttatccgttgccattgccctccaatctgaacacatgaaactgtttgagaa
gtttttgtttgagatatga
SEQ ID NO: 8
Arabidopsis thaliana HCT protein (At5g48930) NP_199704
MKINIRDSTMVRPATETPITNLWNSNVDLVIPRFHTPSVYFYRPTGASNFFDPQVMKE
ALSKALVPFYPMAGRLKRDDDGRIEIDCNGAGVLFVVADTPSVIDDFGDFAPTLNLR
QLIPEVDHSAGIHSFPLLVLQVTFFKCGGASLGVGMQHHAADGFSGLHFINTWSDMA
RGLDLTIPPFIDRTLLRARDPPQPAFHHVEYQPAPSMKIPLDPSKSGPENTTVSIFKLTR
DQLVALKAKSKEDGNTVSYSSYEMLAGHVWRSVGKARGLPNDQETKLYIATDGRS
RLRPQLPPGYFGNVIFTATPLAVAGDLLSKPTWYAAGQIHDFLVRMDDNYLRSALD
YLEMQPDLSALVRGAHTYKCPNLGITSWVRLPIYDADFGWGRPIFMGPGGIPYEGLS
FVLPSPTNDGSLSVAIALQSEHMKLFEKFLFEI
SEQ ID NO: 9
Arabidopsis thaliana C3H nucleic acid (At4g34050) NM_119566
atggcgacgacaacaacagaagcaacgaagacatcatcgaccaatggagaagatcagaagcagtctcagaatcttcgacatcaaga
agttggtcacaagagtctcttacagagcgatgatctctaccagtatatactggagacaagtgtgtatcctagagaaccagaatcaatgaa
ggaactcagggaagtgacagcaaaacatccatggaacataatgaccacatcagctgatgaaggacagttcttaaacatgcttatcaag
ctcgttaacgccaagaacacaatggagatcggagtttacactggctactctcttctcgccaccgctcttgctctccctgaagacggcaaa
attctggctatggatgtcaacagagagaattacgaattgggtttaccgatcattgagaaagccggcgttgctcacaagatcgacttcagg
gaaggccctgctcttcccgttcttgatgaaatcgttgctgacgagaagaaccatggaacatatgactttatattcgttgatgctgacaaag
acaactacatcaactaccacaagcgtttgatcgatcttgtgaaaattggaggagtgattggctacgacaacactctgtggaatggttctgt
cgtggctcctcctgatgcaccaatgaggaagtacgttcgttactacagagactttgttcttgagcttaacaaggctcttgctgctgaccctc
ggatcgagatctgtatgctccctgttggtgatggaatcactatctgccgtcggatcagttga
SEQ ID NO: 10
Arabidopsis thaliana C3H protein (At4g34050) NP_850337
MSWFLIAVATIAAVVSYKLIQRLRYKFPPGPSPKPIVGNLYDIKPVRFRCYYEWAQSY
GPIISVWIGSILNVVVSSAELAKEVLKEHDQKLADRHRNRSTEAFSRNGQDLIWADY
GPHYVKVRKVCTLELFTPKRLESLRPIREDEVTAMVESVFRDCNLPENRAKGLQLRK
YLGAVAFNNITRLAFGKRFMNAEGVVDEQGLEFKAIVSNGLKLGASLSIAEHIPWLR
WMFPADEKAFAEHGARRDRLTRAIMEEHTLARQKSSGAKQHFVDALLTLKDQYDL
SEDTIIGLLWDMITAGMDTTAITAEWAMAEMIKNPRVQQKVQEEFDRVVGLDRILTE
ADFSRLPYLQCVVKESFRLHPPTPLMLPHRSNADVKIGGYDIPKGSNVHVNVWAVA
RDPAVWKNPFEFRPERFLEEDVDMKGHDFRLLPFGAGRRVCPGAQLGINLVTSMMS
HLLHHFVWTPPQGTKPEEIDMSENPGLVTYMRTPVQAVATPRLPSDLYKRVPYDM
SEQ ID NO: 11
Arabidopsis thaliana CCR1 nucleic acid (At1g15950) NM_101463
atgccagtcgacgtagcctcaccggccggaaaaaccgtctgcgtcaccggagctggtggatacatcgcttcttggattgttaagatact
tctcgagagaggttacacagtcaaaggaaccgtacggaatccagatgatccgaagaacacacatttgagagaactagaaggaggaa
aggagagactgattctgtgcaaagcagatcttcaggactacgaggctcttaaggcggcgattgatggttgcgacggcgtctttcacacg
gcttctcctgtcaccgacgatccggaacaaatggtggagccggccgtgaatggagccaagtttgtaattaatgctgcggctgaggcca
aggtcaagcgcgtggtcatcacctcctccattggtgccgtctacatggacccgaaccgtgaccctgaggctgtcgttgacgaaagttgt
tggagtgatcttgacttctgcaaaaacaccaagaattggtattgttacggcaagatggtggcggaacaagcggcgtgggagacagca
aaggagaaaggtgttgacttggtggtgttgaatccggtgctggttcttggaccgccgttacagccgacgatcaacgccagtctttacca
cgtcctcaaatatctaaccggctcggctaagacttatgctaatttgactcaagcttatgtggatgttcgcgatgtcgcgctggctcatgttct
ggtctatgaggcaccctcggcctccggacgttatctcctagccgagagtgctcgccaccgcggggaagttgttgagattctggctaag
ctattcccggagtatcctcttccgaccaagtgcaaggacgagaagaaccctagagccaagccatacaaattcactaaccagaagatta
aggacttaggcttagagttcacttccaccaagcaaagcctctacgacacagtcaagagcttacaagagaaaggccatcttgctcctcct
cctcctcctccttcagcatcgcaagaatccgtggaaaatggcattaagatcgggtcttga
SEQ ID NO: 12
Arabidopsis thaliana CCR1 protein (At1g15950) NP_173047
MPVDVASPAGKTVCVTGAGGYIASWIVKILLERGYTVKGTVRNPDDPKNTHLRELE
GGKERLILCKADLQDYEALKAAIDGCDGVFHTASPVTDDPEQMVEPAVNGAKFVIN
AAAEAKVKRVVITSSIGAVYMDPNRDPEAVVDESCWSDLDFCKNTKNWYCYGKMV
AEQAAWETAKEKGVDLVVLNPVLVLGPPLQPTINASLYHVLKYLTGSAKTYANLTQ
AYVDVRDVALAHVLVYEAPSASGRYLLAESARHRGEVVEILAKLFPEYPLPTKCKDE
KNPRAKPYKFTNQKIKDLGLEFTSTKQSLYDTVKSLQEKGHLAPPPPPPSASQESVEN
GIKIGS
SEQ ID NO: 13
Arabidopsis thaliana NST1 (At2g46770) nucleic acid NM_130243
atgatgtcaaaatctatgagcatatcagtgaacggacaatctcaagtgcctcctgggtttaggtttcatccgaccgaggaagagctgttg
cagtattatctccggaagaaagttaatagcatcgagatcgatcttgatgtcattcgcgacgttgatctcaacaagctcgagccttgggaca
ttcaagagatgtgtaaaataggaacaacgccacaaaacgactggtatttctttagccacaaggacaaaaaatatccgacgggaacgag
aactaacagagccactgcggctggattttggaaagcaactggccgcgacaagatcatatatagcaatggccgtagaattgggatgag
aaagactcttgttttctacaaaggccgagctcctcacggccaaaaatctgattggatcatgcatgaatatagactcgatgacaacattattt
cccccgaggatgtcaccgttcatgaggtcgtgagtattataggggaagcatcacaagacgaaggatgggtggtgtgtcgtattttcaag
aagaagaatcttcacaaaaccctaaacagtcccgtcggaggagcttccctgagcggcggcggagatacgccgaagacgacatcatc
tcagatcttcaacgaggatactctcgaccaatttcttgaacttatggggagatcttgtaaagaagagctaaatcttgaccctttcatgaaact
cccaaacctcgaaagccctaacagtcaggcaatcaacaactgccacgtaagctctcccgacactaatcataatatccacgtcagcaac
gtggtcgacactagctttgttactagctgggcggctttagaccgcctcgtggcctcgcagcttaacggacccacatcatattcaattaca
gccgtcaatgagagccacgtgggccatgatcatctcgctttgccttccgtccgatctccgtaccccagcctaaaccggtccgcttcgtac
cacgccggtttaacacaggaatatacaccggagatggagctatggaatacgacgacgtcgtctctatcgtcatcgcctggcccattttgt
cacgtgtcgaatggtagtggataa
SEQ ID NO: 14
Arabidopsis thaliana NST1 (At2g46770) protein NP_182200
MMSKSMSISVNGQSQVPPGFRFHPTEEELLQYYLRKKVNSIEIDLDVIRDVDLNKLEP
WDIQEMCKIGTTPQNDWYFFSHKDKKYPTGTRTNRATAAGFWKATGRDKIIYSNGR
RIGMRKTLVFYKGRAPHGQKSDWIMHEYRLDDNIISPEDVTVHEVVSIIGEASQDEG
WVVCRIFKKKNLHKTLNSPVGGASLSGGGDTPKTTSSQIFNEDTLDQFLELMGRSCK
EELNLDPFMKLPNLESPNSQAINNCHVSSPDTNHNIHVSNVVDTSFVTSWAALDRLV
ASQLNGPTSYSITAVNESHVGHDHLALPSVRSPYPSLNRSASYHAGLTQEYTPEMEL
WNTTTSSLSSSPGPFCHVSNGSG
SEQ ID NO: 15
Arabidopsis thaliana NST2 (At3g61910) nucleic acid NM_116056
atgaacatatcagtaaacggacagtcacaagtacctcctggctttaggtttcacccaaccgaggaagagctcttgaagtattacctccgc
aagaaaatctctaacatcaagatcgatctcgatgttattcctgacattgatctcaacaagctcgagccttgggatattcaagagatgtgtaa
gattggaacgacgccgcaaaacgattggtacttttatagccataaggacaagaagtatcccaccgggactagaaccaacagagccac
cacggtcggattttggaaagcgacgggacgtgacaagaccatatataccaatggtgatagaatcgggatgcgaaagacgcttgtcttc
tacaaaggtcgagcccctcatggtcagaaatccgattggatcatgcacgaatatagactcgacgagagtgtattaatctcctcgtgtggc
gatcatgacgtcaacgtagaaacgtgtgatgtcataggaagtgacgaaggatgggtggtgtgtcgtgttttcaagaaaaataacctttgc
aaaaacatgattagtagtagcccggcgagttcggtgaaaacgccgtcgttcaatgaggagactatcgagcaacttctcgaagttatggg
gcaatcttgtaaaggagagatagttttagaccctttcttaaaactccctaacctcgaatgccataacaacaccaccatcacgagttatcagt
ggttaatcgacgaccaagtcaacaactgccacgtcagcaaagttatggatcccagcttcatcactagctgggccgctttggatcggctc
gttgcctcacagttaaatgggcccaactcgtattcaataccagccgttaatgagacttcacaatcaccgtatcatggactgaaccggtcc
ggttgtaataccggtttaacaccagattactatataccggagattgatttatggaacgaggcagatttcgcgagaacgacatgccacttgt
tgaacggtagtggataa
SEQ ID NO: 16
Arabidopsis thaliana NST2 (At3g61910) protein NP _191750
MNISVNGQSQVPPGFRFHPTEEELLKYYLRKKISNIKIDLDVIPDIDLNKLEPWDIQEM
CKIGTTPQNDWYFYSHKDKKYPTGTRTNRATTVGFWKATGRDKTIYTNGDRIGMRK
TLVFYKGRAPHGQKSDWIMHEYRLDESVLISSCGDHDVNVETCDVIGSDEGWVVCR
VFKKNNLCKNMISSSPASSVKTPSFNEETIEQLLEVMGQSCKGEIVLDPFLKLPNLECH
NNTTITSYQWLIDDQVNNCHVSKVMDPSFITSWAALDRLVASQLNGPNSYSIPAVNE
TSQSPYHGLNRSGCNTGLTPDYYIPEIDLWNEADFARTTCHLLNGSG
SEQ ID NO: 17
Arabidopsis thaliana NST3/SND1 (At1g32770) nucleic acid NM_103011
atggctgataataaggtcaatctttcgattaatggacaatcaaaagtgcctccaggtttcagattccatcccaccgaagaagaacttctcc
attactatctccgtaagaaagttaactctcaaaagatcgatcttgatgtcattcgtgaagttgatctaaacaagcttgagccttgggatattc
aagaggaatgtagaatcggttcaacgccacaaaacgactggtacttcttcagccacaaggacaagaagtatccaaccgggaccagg
acgaaccgggcaacagtcgctggattctggaaagctaccggacgtgacaaaatcatctgcagttgtgtccggagaattggactgagg
aagacactcgtgttctacaaaggaagagctcctcacggtcagaaatccgactggatcatgcatgagtatcgcctcgacgatactccaat
gtctaatggctatgctgatgttgttacagaagatccaatgagctataacgaagaaggttgggtggtatgtcgagtgttcaggaagaagaa
ctatcaaaagattgacgattgtcctaaaatcactctatcttctttacctgatgacacggaggaagagaaggggcccacctttcacaacact
caaaacgttaccggtttagaccatgttcttctctacatggaccgtaccggttctaacatttgcatgcccgagagccaaacaacgactcaa
catcaagatgatgtcttattcatgcaactcccaagtcttgagacacctaaatccgagagcccggtcgaccaaagtttcctgactccaagc
aaactcgatttctctcccgttcaagagaagataaccgaaagaccggtttgcagcaactgggctagtcttgaccggctcgtagcttggca
attgaacaatggtcatcataatccgtgtcatcgtaagagttttgatgaagaagaagaaaatggtgatactatgatgcagcgatgggatctt
cattggaataatgatgataatgttgatctttggagtagtttcactgagtcttcttcgtctttagacccacttcttcatttatctgtatga
SEQ ID NO: 18
Arabidopsis thaliana NST3/SND1 (At1g32770) protein NP_174554
MADNKVNLSINGQSKVPPGFRFHPTEEELLHYYLRKKVNSQKIDLDVIREVDLNKLE
PWDIQEECRIGSTPQNDWYFFSHKDKKYPTGTRTNRATVAGFWKATGRDKIICSCVR
RIGLRKTLVFYKGRAPHGQKSDWIMHEYRLDDTPMSNGYADVVTEDPMSYNEEGW
VVCRVFRKKNYQKIDDCPKITLSSLPDDTEEEKGPTFHNTQNVTGLDHVLLYMDRTG
SNICMPESQTTTQHQDDVLFMQLPSLETPKSESPVDQSFLTPSKLDFSPVQEKITERPV
CSNWASLDRLVAWQLNNGHHNPCHRKSFDEEEENGDTMMQRWDLHWNNDDNVD
LWSSFTESSSSLDPLLHLSV
SEQ ID NO: 19
Arabidopsis thaliana SND2 (At4g28500) nucleic acid NM_118992
atgacttggtgcaatgaccgtagcgatgttcagaccgttgaaagaatcattccctccccgggggcggctgagtcccccgtagcctcact
tccggtctcttgtcacaaaacttgcccttcttgtggccataacttcaagtttcacgaacaggctgggatccatgacttgccgggacttcctg
ctggagtaaaatttgatccgacggatcaagaggtcttggagcatcttgaaggcaaggtaagagatgacgcaaaaaagcttcatcctctc
attgatgagtttatccgtaccatcgatggtgaaaacggcatttgttatacccatcctgaaaaattgccaggagtgaacaaggacgggacg
gtgcgtcatttcttccaccgaccgtcgaaggcatacacgacgggaacaagaaagcgacgtaaagtccacactgattctgacgtcggtg
gagagacacggtggcacaagacaggaaaaacacggccagttcttgctggaggaagagtgagaggctacaagaaaatcctagtgct
ctacacaaactacggcaaacaaaaaaaacccgagaagactaattgggtaatgcatcaatatcatcttggcactagcgaggaagagaa
agaaggtgagctcgtcgtctccaaagtcttttaccagactcaaccacgtcaatgcggtggctccgttgctgctgcagccaccgctaagg
accgaccttacctccacggcctcggtggaggtggtggccgccaccttcattaccatcttcatcataacaacggtaacggtaagagcaa
cggcagtgggggaaccgccggagccggtgagtattatcacaatattccggctattatctcgttcaatcagaccgggatacagaaccac
ttggttcatgactctcaaccttttatcccttaa
SEQ ID NO: 20
Arabidopsis thaliana SND2 (At4g28500) protein NP_194579
MTWCNDRSDVQTVERIIPSPGAAESPVASLPVSCHKTCPSCGHNFKFHEQAGIHDLPG
LPAGVKFDPTDQEVLEHLEGKVRDDAKKLHPLIDEFIRTIDGENGICYTHPEKLPGVN
KDGTVRHFFHRPSKAYTTGTRKRRKVHTDSDVGGETRWHKTGKTRPVLAGGRVRG
YKKILVLYTNYGKQKKPEKTNWVMHQYHLGTSEEEKEGELVVSKVFYQTQPRQCG
GSVAAAATAKDRPYLHGLGGGGGRHLHYHLHHNNGNGKSNGSGGTAGAGEYYHN
IPAIISFNQTGIQNHLVHDSQPFIP
SEQ ID NO: 21
Arabidopsis thaliana SND3 (At1g28470) nucleic acid NM_102615
atgagttggtgtgatggttcagatgataactacgatcttaatcttgaaagagtatcgaacactgatcatccatcggttcaactcaaagacca
atctcaatcatgtgtaacgagccgtccagattccaagattagcgctgaaactcccatcacgacttgtccttcttgcggacacaagctccat
catcaccaagacgaccaggttggtagcatcaaagatttaccaagcttaccggcaggagtcaaattcgatccgtcggataaagagatcc
ttatgcatttggaggcgaaggtatcatccgataagcgaaaacttcatccgttgattgatgaatttatacctacgcttgaaggagagaatgg
aatttgttatacgcatcctgagaaacttcctggagtaagcaaggacgggcaagtacggcacttcttccaccggccatcaaaggcttatac
gaccggaacacgaaaacgaagaaaagtgagcacagatgaggaaggccatgaaacaaggtggcacaaaacaggcaagactcgac
ctgttttgtctcaatcaggagaaaccggtttcaagaagatcctagtgctctacaccaactatggtcgccagaagaagcctgagaagacg
aattgggtgatgcatcagtatcatttaggtagcagcgaggacgaaaaagacggtgaaccagtcctctctaaagtcttctaccaaacaca
gcctaggcaatgcggttcgatggaacctaaaccgaaaaatctcgtaaacctaaaccggtttagttatgaaaatattcaggccggtttcgg
gtatgagcatggtggtaaaagtgaagagacgacgcaggtgattcgagagttggtagttcgtgaaggcgatgggtcatgttcgtttctta
gttttacttgtgatgcaagtaagggtaaagaaagcttcatgaagaatcaatag
SEQ ID NO: 22
Arabidopsis thaliana SND3 (At1g28470) protein NP_564309
MSWCDGSDDNYDLNLERVSNTDHPSVQLKDQSQSCVTSRPDSKISAETPITTCPSCG
HKLHHHQDDQVGSIKDLPSLPAGVKFDPSDKEILMHLEAKVSSDKRKLHPLIDEFIPT
LEGENGICYTHPEKLPGVSKDGQVRHFFHRPSKAYTTGTRKRRKVSTDEEGHETRW
HKTGKTRPVLSQSGETGFKKILVLYTNYGRQKKPEKTNWVMHQYHLGSSEDEKDGE
PVLSKVFYQTQPRQCGSMEPKPKNLVNLNRFSYENIQAGFGYEHGGKSEETTQVIRE
LVVREGDGSCSFLSFTCDASKGKESFMKNQ
SEQ ID NO: 23
Arabidopsis thaliana MYB103 (At1g63910) nucleic acid NM_105065
atgggtcatcactcatgctgcaaccagcaaaaggtgaagagagggctttggtcaccggaagaagatgagaagcttattagatatatca
caactcatggctatggatgttggagtgaagtccctgaaaaagcagggcttcaaagatgtggaaaaagttgtagattgcgatggataaac
tatcttcgacctgatatcaggagaggaaggttctctccagaagaagagaaattgatcataagccttcatggagttgtgggaaacaggtg
ggctcatatagctagtcatttaccgggaagaacagataacgagattaaaaactattggaattcatggattaagaaaaagatacgaaaac
cgcaccatcattacagtcgtcatcaaccgtcagtaactactgtgacattgaatgcggacactacatcgattgccactaccatcgaggcct
ctaccaccacaacatcgactatcgataacttacattttgacggtttcactgattctcctaaccaattaaatttcaccaatgatcaagaaacta
atataaagattcaagaaacttttttctcccataaacctcctctcttcatggtagacacaacacttcctatcctagaaggaatgttctctgaaaa
catcatcacaaacaataacaagaacaatgatcatgatgacacgcaaagaggaggaagagaaaatgtttgtgaacaagcatttctaaca
actaacacggaagaatgggatatgaatcttcgtcagcaagagccgtttcaagttcctacactggcgtcacatgtgttcaacaactcttcca
attcaaatattgacacggttataagttataatctaccggcgctaatagagggaaatgtcgataacatcgtccataatgaaaacagcaatgt
ccaagatggagaaatggcgtccacattcgaatgtttaaagaggcaagaactaagctatgatcaatgggacgattcacaacaatgctcta
actttttcttttgggacaaccttaatataaacgtggaaggttcatctcttgttggaaaccaagacccatcaatgaatttgggatcatctgcctt
atcttcttctttcccttcttcgttttaa
SEQ ID NO: 24
Arabidopsis thaliana MYB103 (At1g63910) protein NP_176575
MGHHSCCNQQKVKRGLWSPEEDEKLIRYITTHGYGCWSEVPEKAGLQRCGKSCRLR
WINYLRPDIRRGRFSPEEEKLIISLHGVVGNRWAHIASHLPGRTDNEIKNYWNSWIKK
KIRKPHHHYSRHQPSVTTVTLNADTTSIATTIEASTTTTSTIDNLHFDGFTDSPNQLNF
TNDQETNIKIQETFFSHKPPLFMVDTTLPILEGMFSENIITNNNKNNDHDDTQRGGRE
NVCEQAFLTTNTEEWDMNLRQQEPFQVPTLASHVFNNSSNSNIDTVISYNLPALIEGN
VDNIVHNENSNVQDGEMASTFECLKRQELSYDQWDDSQQCSNFFFWDNLNINVEGS
SLVGNQDPSMNLGSSALSSSFPSSF
SEQ ID NO: 25
Arabidopsis thaliana MYB85 (At4g22680) nucleic acid NM_118394
atggggagacagccatgctgtgacaagctaggggtgaagaaagggccgtggacggtggaggaagataagaagcttataaacttcat
actaaccaatggccattgttgctggcgtgctttgccgaagctggccggtctccgtcgctgtggaaagagctgccgcctccggtggacta
actatctccggcctgacttaaaacgaggccttctctcgcatgatgaagaacaacttgtcatagatcttcatgctaatctcggcaataagtg
gtctaagatagcttcaagattacctggaagaacagataacgaaataaaaaaccattggaatactcatatcaagaagaaacttcttaagat
gggaatcgatcctatgacccatcaacccctaaatcaagaaccttctaatatcgataattccaaaaccattccgtccaatccagacgatgtc
tcagtggaaccaaagacaactaacacgaaatacgtggagataagtgtcacgacaacagaagaagaaagtagtagcacggttactgat
caaaacagttcgatggataatgaaaatcatctaattgacaacatttatgatgatgatgaattgtttagttacttatggtccgacgaaactact
aaagatgaggcctcttggagtgatagtaactttggtgttggtggaacattatatgaccacaatatctccggcgccgatgcagattttccga
tatggtcaccggaaagaatcaatgacgagaagatgtttttggattattgtcaagactttggtgttcatgattttgggttttga
SEQ ID NO: 26
Arabidopsis thaliana MYB85 (At4g22680) protein NP_567664
MGRQPCCDKLGVKKGPWTVEEDKKLINFILTNGHCCWRALPKLAGLRRCGKSCRLR
WTNYLRPDLKRGLLSHDEEQLVIDLHANLGNKWSKIASRLPGRTDNEIKNHWNTHI
KKKLLKMGIDPMTHQPLNQEPSNIDNSKTIPSNPDDVSVEPKTTNTKYVEISVTTTEE
ESSSTVTDQNSSMDNENHLIDNIYDDDELFSYLWSDETTKDEASWSDSNFGVGGTLY
DHNISGADADFPIWSPERINDEKMFLDYCQDFGVHDFGF
SEQ ID NO: 27
Arabidopsis thaliana MYB46 (At5g12870) nucleic acid NM_121290
atgaggaagccagaggtagccattgcagctagtactcaccaagtaaagaagatgaagaagggactttggtctcctgaggaagactca
aagctgatgcaatacatgttaagcaatggacaaggatgttggagtgatgttgcgaaaaacgcaggacttcaaagatgtggcaaaagct
gccgtcttcgttggatcaactatcttcgtcctgacctcaagcgtggcgctttctctcctcaagaagaggatctcatcattcgctttcattccat
cctcggcaacaggtggtctcagattgcagcacgattgcctggtcggaccgataacgagatcaagaatttctggaactcaacaataaag
aaaaggctaaagaagatgtccgatacctccaacttaatcaacaactcatcctcatcacccaacacagcaagcgattcctcttctaattcc
gcatcttctttggatattaaagacattataggaagcttcatgtccttacaagaacaaggcttcgtcaacccttccttgacccacatacaaac
caacaatccatttccaacgggaaacatgatcagccacccgtgcaatgacgattttaccccttatgtagatggtatctatggagtaaacgc
aggggtacaaggggaactctacttcccacctttggaatgtgaagaaggtgattggtacaatgcaaatataaacaaccacttagacgagt
tgaacactaatggatccggaaacgcacctgagggtatgagaccagtggaagaattttgggaccttgaccagttgatgaacactgaggt
tccttcgttttacttcaacttcaaacaaagcatatga
SEQ ID NO: 28
Arabidopsis thaliana MYB46 (At5g12870) protein NP_196791
MRKPEVAIAASTHQVKKMKKGLWSPEEDSKLMQYMLSNGQGCWSDVAKNAGLQR
CGKSCRLRWINYLRPDLKRGAFSPQEEDLIIRFHSILGNRWSQIAARLPGRTDNEIKNF
WNSTIKKRLKKMSDTSNLINNSSSSPNTASDSSSNSASSLDIKDIIGSFMSLQEQGFVN
PSLTHIQTNNPFPTGNMISHPCNDDFTPYVDGIYGVNAGVQGELYFPPLECEEGDWY
NANINNHLDELNTNGSGNAPEGMRPVEEFWDLDQLMNTEVPSFYFNFKQSI
SEQ ID NO: 29
Arabidopsis thaliana MYB83 (At3g08500) nucleic acid NM_111685
atgatgatgaggaaaccggacattactacgatcagagacaaaggcaagccaaatcatgcatgtggtggtaataacaacaaaccgaag
ctaagaaaaggactttggtcgcctgatgaagatgagaagctgataagatacatgttgactaatggacaaggatgttggagtgacatcgc
tagaaatgctggtcttttacgttgtggtaaaagttgtcgccttcgctggatcaattacttgaggcctgatcttaaacgtggatccttctctcct
caggaggaggatctcatcttccatttgcattccattcttggtaacaggtggtctcaaatagctactcggcttccaggtagaacagacaacg
agatcaaaaacttttggaactcgacattgaagaagcggcttaagaacaacagcaacaacaatacttcatcaggatcatcacctaacaat
agtaatagtaattccttggacccaagagatcaacatgtggatatgggaggcaactcaacttcattgatggatgactatcatcatgatgaaa
acatgatgacagtggggaacaccatgcgcatggactcttcctccccattcaatgttggaccaatggttaatagtgtgggcttaaaccaac
tttatgatcccttgatgatatcagtgccggataacggatatcaccaaatgggaaacacagtgaatgtgttcagcgttaatggtttaggaga
ttatggaaacacaattcttgatccaattagcaagagagtatcagtagaaggtgatgattggttcattcccccctcggagaataccaacgtc
attgcttgtagtacaagcaacaacctaaacttacaggcccttgatccttgcttcaatagcaaaaatctttgtcattcagaaagcttcaaggta
gggaatgtgttggggatagagaatggttcttgggaaatagaaaaccctaaaatcggagattgggatttggatggtctcatcgataacaa
ctcttcttttcccttccttgatttccaagtcgattga
SEQ ID NO: 30
Arabidopsis thaliana MYB83 (At3g08500) protein NP_187463
MMMRKPDITTIRDKGKPNHACGGNNNKPKLRKGLWSPDEDEKLIRYMLTNGQGCW
SDIARNAGLLRCGKSCRLRWINYLRPDLKRGSFSPQEEDLIFHLHSILGNRWSQIATRL
PGRTDNEIKNFWNSTLKKRLKNNSNNNTSSGSSPNNSNSNSLDPRDQHVDMGGNSTS
LMDDYHHDENMMTVGNTMRMDSSSPFNVGPMVNSVGLNQLYDPLMISVPDNGYH
QMGNTVNVFSVNGLGDYGNTILDPISKRVSVEGDDWFIPPSENTNVIACSTSNNLNL
QALDPCFNSKNLCHSESFKVGNVLGIENGSWEIENPKIGDWDLDGLIDNNSSFPFLDF
QVD
SEQ ID NO: 31
Arabidopsis thaliana MYB58 (At1g16490) nucleic acid NM_101514
atgggcaaaggaagagcaccatgttgtgacaaaaccaaagtgaagagaggaccatggagccatgatgaagacttgaaactcatctct
ttcattcacaagaatggtcatgagaattggagatctctcccaaagcaagctggattgttgaggtgtggcaagagttgtcgtctgcgatgg
attaattacctcagacctgatgtgaaacgtggcaatttcagtgcagaggaagaagacaccatcatcaaacttcaccagagctttggtaac
aagtggtcgaagattgcttctaagctgcctggaagaacagacaatgagatcaagaatgtgtggcatacacatctcaagaaaagattga
gctcggaaactaaccttaatgccgatgaagcgggttcaaaaggttctttgaatgaagaagagaactctcaagagtcatctccaaatgctt
caatgtcttttgctggttccaacatttcaagcaaagacgatgatgcacagataagtcaaatgtttgagcacattctaacttatagcgagttta
cggggatgttacaagaggtagacaaaccagagctgctggagatgccttttgatttagatcctgacatttggagtttcatagatggttcaga
ctcattccaacaaccagagaacagagctcttcaagagtctgaagaagatgaagttgataaatggtttaagcacctggaaagcgaactc
gggttagaagaaaacgataaccaacaacaacaacaacagcataaacagggaacagaagatgaacattcatcatcactcttggagagt
tacgagctcctcatacattaa
SEQ ID NO: 32
Arabidopsis thaliana MYB58 (At1g16490) protein NP_173098
MGKGRAPCCDKTKVKRGPWSHDEDLKLISFIHKNGHENWRSLPKQAGLLRCGKSCR
LRWINYLRPDVKRGNFSAEEEDTIIKLHQSFGNKWSKIASKLPGRTDNEIKNVWHTH
LKKRLSSETNLNADEAGSKGSLNEEENSQESSPNASMSFAGSNISSKDDDAQISQMFE
HILTYSEFTGMLQEVDKPELLEMPFDLDPDIWSFIDGSDSFQQPENRALQESEEDEVD
KWFKHLESELGLEENDNQQQQQQHKQGTEDEHSSSLLESYELLIH
SEQ ID NO: 33
Arabidopsis thaliana MYB63 (At1g79180) nucleic acid NM_106569
atggggaagggaagagcaccttgttgtgacaagaccaaagtgaagagaggtccatggagcccagaagaagacattaaactcatctct
ttcattcaaaagtttggtcatgagaactggagatctctccccaaacaatctgggctattgaggtgtgggaagagttgtcgtctaaggtgga
ttaactatcttaggccagatctgaagcgtggcaacttcacttcagaggaggaagaaacaatcattaagcttcaccacaactatgggaac
aagtggtcgaaaatcgcttctcaacttccaggtagaacagataacgagatcaagaatgtgtggcacactcatctaaagaaaagactgg
ctcagagctcaggaactgcagatgaaccggcctcgccttgttcgagtgattctgtttctcgtgggaaagatgataagtcatctcacgtag
aagattctttgaacagagagactaatcataggaatgagttgtctacatctatgtcttctgggggttccaaccaacaagatgatccaaagat
agacgaactcaggtttgagtatatagaagaagcttatagcgagtttaacgacattattattcaagaggtagacaaacccgatctgctgga
gataccatttgattcagatcctgacatttggagtttcttagatacttcaaactcatttcaacaatccactgcaaatgagaacagctcaggctc
aagagcaacaacagaagaagagtctgatgaggatgaggttaagaaatggttcaagcacctagaaagcgaactcgggttagaagaag
acgataatcaacaacaatacaaagaagaagaatcatcatcatcatcactcttgaagaactacgagctcatgatacattga
SEQ ID NO: 34
Arabidopsis thaliana MYB63 (At1g79180) protein NP_178039
MGKGRAPCCDKTKVKRGPWSPEEDIKLISFIQKFGHENWRSLPKQSGLLRCGKSCRL
RWINYLRPDLKRGNFTSEEEETIIKLHHNYGNKWSKIASQLPGRTDNEIKNVWHTHL
KKRLAQSSGTADEPASPCSSDSVSRGKDDKSSHVEDSLNRETNHRNELSTSMSSGGS
NQQDDPKIDELRFEYIEEAYSEFNDIIIQEVDKPDLLEIPFDSDPDIWSFLDTSNSFQQST
ANENSSGSRATTEEESDEDEVKKWFKHLESELGLEEDDNQQQYKEEESSSSSLLKNY
ELMIH
SEQ ID NO: 35
Promoter pIRX8
ACGAGCTGACTTGTACCGATGAGCTGGCTCTTCTGGGCGAGCTGGCTGATCTTGA
CGAGCAGACTTCTCCCGACGAGCTGACTTGTGTCGATGAGCTGGCTCTTCTGGGC
GAGTTGGCTGATCTTGACGAGCAGACTTCTCCCGACGAGCTGACTTGTGTCGATG
AGCTGGCTCTTCTGGGCGAACTGGCTGATCTTGACGAGCAGACTTCTCCCGACGA
GCTGACTTGTGCTATCCTTTCTCCAGGTCTCGAAAAAGTCCCCTTTCCCGAGACTT
TCTATTCCTTATTTATACCCGTCCGTATAGTAGGGTACGCAAGGTGAATTCTCGA
GAGTGCCCCTTTTCTACGCAGCCGAACTCACATCCTGACCAGGCCGGGCTTCGGC
CTGGTGGGCCGGCTCGAGTTCTAAAGTGATGGTCGGGGCTGGGTCGTTATTCCTT
GAAATGGGCCGGTTGATCACTGAGGCCCAATTGATGTATCAACATGTGGTTTTTA
TAAAAAGAGTCGTGAGAAGAGTTTTCTCTAAAAATCCCTTGTGTTTGGTAATCAA
ACTTCATTCAACCAACGAATTCCAAAAAAACAACTAAATTGTTCGGGTATATAAA
ATGATTGGTAATGATATATCCCATAGAGGCCGTAGACATAGGCCCAAAAAGTTTC
CATAACTAGCAGAAATTGAAACTTGCAAGTTGCAAATATTATTACACTGGAAAG
GCAACAAGTCTTGAAGTACAAACTACAAAGACTTCTTGTTTGGATGGGGACGACT
GACGAGTTTGAATAACTTAAGAGAAAAGGGTCGCAATCGAAATTAGACAAGAAA
TTAGTCCTCAAAAAGTAAATTCTGAAGTTGAAGCTCCAATGTCTTTGTTCAAAGA
CTTTATTTAGATGTAAAGTTATGTCTTGTAACCACCAAACAGCTCCTTTTCATCTA
CACTCCCAATTTTTTTAACATCTATGTTTTGCATTGCCTTTGACTTGTCTTTCTCTC
TCCAACTTCTCTCCTTCAACATAAAGCCAAATCCTAAATCCAAATCCCTTAAACC
GAACCGAATTAAACCGAAGCTGTTGAACTATCGCAAAATTTCAGATCTTACTAAT
CATAAACATGTGACGTTTAATTCATTTTAAGAGTTTCATGATTTGCACTGAATGGT
ATTCCGAGTCCACCGGAAAAAAACTTTTCCTACAAGTAGAAAAAGGATAACCCC
ATAAATCCAAATAACCTAACCGATCAAACATATACCAATATAAACCAAAACAAG
ATTCAGATTCATCGGTTTAGTAATCGAAGTAATGTACTAATGTGTAATATTGATT
CCACCACCAGCTTAGAGATTCGAACCAAAAACCGAATAGCGCATAACCGAGAAA
ACCCAAAGCTTCCTAACAAATACATAAAACCGTGGTGTTTCTAATTCTAACCAAC
ACACGTTTCCTTTTTATTCACAAGAAACATCAGAGTTATGATCTGCCATTAATAA
CCTAAACACAAAGCAAGGTTAGGTAAATGATATGGACCCCTAATGAATAATCAT
ACAATACATAACAACGTAAGATCCAGTTTCCCTCTTCG
SEQ ID NO: 36
Promoter pVND6
CGCCAAAAAGATGTTATGATGTGATGCATTCTTTAATATAGATTAAACTATTGGT
GATTTGTTTTTCTATAGTTAATCACTAGCAAGAACATTTTTCTTTTATGTTTACAG
TTTTTAGATTATAAAAAAATGGTGTAATAAGAACATGTCAAATCAAATGTATTTA
ATTTGTTAATATAGATTTGTGTATAAACAATTGGTAGTTTTGATAATTCAATTTTT
CAGCAATCATCATAATAATACTTTACAAGAAAAGCTAAATCATCTGAAAATTTTA
TATGAATACGTACGGTTTAATTCCCAATCTACAACTTTTTTAGTTGGATTTATTAT
AACCGTTTTTCTAAAACAAAACACATTAAAATTTATAAGTGAAGATCCAATGGGT
TCAAACCTTTTAATTCTCAATAAATATACATAGATTCTCGAAGATATCCTATCAA
CTTGTAAAAGTTGTTTAATCAATCTTTTGTTTGATGAAATCTTGTTCAACTGTTGA
TTTGGTTAAGTTTTATAGCTGAAATGTGTATAAGTGTTTCTGAACCTTTTTAATTA
CTGCTAAATCAATTTATGTCTTACAAACTTGCCGATGTATCATGTATGTTCATTAG
GGGTGTCAAAATGAGCCAGCTCGCTCAGCTCAGCTCATGATGAACTTAAATCTTT
TATGAGCCAGCTCAGCTCAACTCATTTATTATATGAGCTTCAAAATACAAACTCG
GACTCAGATCATCTAGATCACGAGCTAAATGAGGTAGTTCGCGAGCTAATGCAA
ATAAATGAAAAAATTTAAATTTTCTAAAATTTTTATGTAAATTATATATTTTTAAA
AATATATTTCTATTTTTATAGATTATATAAATATTTATGTTTTGATTGTTGACTTTT
TGTGTTTATTACTAATATTTATTTTCAGAAATTATTATGTAACTTATATATTTTCTA
AAATATATTTCTATTATTTATAGAAAAATATATATATACTTTGATTGTTAGTTTTT
TGTATATATTACTTCAAAAAAGCCAAACTCATGAGCTAGCTCATGTTCATTAAAG
CTCGCTCATATAACTCGTGAGCTAAATAAAGTTCGATCACTAAACTCATTTATTA
AATGATCCTAAAAAATAGAATTCGCGCTCATGAATAACTGAGTCGAGTTGAGCC
AGCTCATGAGCTATCAGCTCATTTTGACACCATTAATGTTCATATAATAATCGTA
ATCCATCATGACCAATTAGGCAATTAAGACATACTATAACAAAACATTTTTTTTT
TTTTCGTCAAACATTGTTTTGTTAAAGGTTTCAAAAAGAACATGCGTATCAATTTC
ACCAAACGAATCTAATAAATAGCACGACCATCGGATATTATATTGCTATTTGACG
ATCAACGTACGTTCGATTAAAAAAAGTACGGGGATTGTTTAGTTTAATCCAAGTG
TAGTGTTATTTAGACTTCGAGTAACATCAACGCGGGAGAAGAAACGCATGGGAT
GAATGTGTAAAGTGGTTAACTTTCAACAATGTTTCTTAATTGCTAAGATGTTTAA
AACGAGTTTACATGAATTCTTGTGTTACTTATCGAATTATCTTTTATGAGATAATT
AGTACACTACCTTATTAGGGCTCCATTTCTTTTTCTATCTAGGCCTAGGTCGATCA
GTACTGTGTATGTTACACATATGATATTAAAAAAAAAATTGATTCTATAATAATC
TTCATAACTAAAGGCAAGTATAGTTTATTTGAAAACGTCTCATTCAATAGTTGGT
AGAGATAGTTCTAAAAGATCACATTACTTCTCTATCACACAGAGTGTAGAAAAGT
GAAAACTTATGCAACACTTCAGGTAGAAAGAGAAAAGACAGTGATAGCTTAGTT
ATAATTAAAGACCCCCAAAATCCAAATAGAATCTTCTCTTAAATAAACTATTGAA
AAAATATTCACAAAAAAATAAAAAGCACATTTCCTTTTGCTTGCATCACGAGAGC
TTTTGTCTCTCTTTACATTTATGTGCCTATATATAAGCCTAGAGAATCCACCATCA
TCGGAGTACTCGTTGTCTTTCATGATCTCAACATAAACAAGACAAAACGCTTTTG
TCTCTTGTCTATCTAAATTAAATCTACGAGGAAACGAAGAGAAGCAACAAAATTC
GATATTTTAGAAGTCTTGCATAAATAAGAAGAAGGTTTCAAGTAAGTTTCTTTCA
GTACATAGAGAAACCATGTATATGATTTATGATTGTCAAGATGTTACACAGTCGT
ATATATAATTATAAGTATTTCATAAAAGTAATTTATGAAACCATGCACATAACTA
ACTTTTGTTTTTGATTTTGTAAATTGAGTAGTTTTTGTTTTTATTATCATTTTTATG
TGTTTATAGTTGGTTCAGCCGAGATATTATGAGTAACCAAACGTAACCTTTTTCAT
AATGAAACGGATCAAATATACTTTAATCTTTTTCCTACATATGCTTAGTTACTTGA
AAACTTGATTTCACATTACTTCTATGCATATCTTTTCTATGTACCGCGCGATGATA
AAGTATGTGTTACAAATTGCCACATTGCAGAAAATATAAAATTAAAAAGATCAA
ATGGAAAGTCTCGCACAC

Illustrative SHN1 Protein Seuqences and accession numbers

SEQ ID NO: 37 AtSHN1_At1g15360_NP_172988
MVQTKKFRGVRQRHWGSWVAEIRHPLLKRRIWLGTFETAEEAARAYDEAAVLMSG
RNAKTNFPLNNNNTGETSEGKTDISASSTMSSSTSSSSLSSILSAKLRKCCKSPSPSLTC
LRLDTASSHIGVWQKRAGSKSDSSWVMTVELGPASSSQETTSKASQDAILAPTTEVEI
GGSREEVLDEEEKVALQMIEELLNTN
SEQ ID NO: 38 AtSHN2_At5g11190_NP_196680
MVHSRKFRGVRQRQWGSWVSEIRHPLLKRRVWLGTFETAEAAARAYDQAALLMN
GQNAKTNFPVVKSEEGSDHVKDVNSPLMSPKSLSELLNAKLRKSCKDLTPSLTCLRL
DTDSSHIGVWQKRAGSKTSPTWVMRLELGNVVNESAVDLGLTTMNKQNVEKEEEE
EEAIISDEDQLAMEMIEELLNWS
SEQ ID NO: 39 AtSHN3_At5g25390_NP_197921
MVHSKKFRGVRQRQWGSWVSEIRHPLLKRRVWLGTFDTAETAARAYDQAAVLMN
GQSAKTNFPVIKSNGSNSLEINSALRSPKSLSELLNAKLRKNCKDQTPYLTCLRLDND
SSHIGVWQKRAGSKTSPNWVKLVELGDKVNARPGGDIETNKMKVRNEDVQEDDQ
MAMQMIEELLNWTCPGSGSIAQV
SEQ ID NO: 40 PtSHN1_XP_002324652
MVQSKKFRGVRQRHWGSWVSEIRHPLLKRRVWLGTFETAEEAARAYDQAAILMSG
RNAKTNFPIPQTSNEEDPKSSDEASLPTPPNGLSEILHAKLRKCSKAPSPSMTCLRLDT
ENSLIGVWQKRAGERSDSNWVMRVQLGQRESQVSESTLPLPQSSGGVSEPELRAEM
GEDERIALQMIEELLNRNCPSPSFGVQDHGDGSLFL
SEQ ID NO: 41 PtSHN2_XP_002308080
MVPSKKFRGVRQRRWGSWVSEIRHPLVKRRVWLGTFETAEEAARAYDQAAILMSG
RNAKTNFPMPQTSNEDDPKSSDHQPSLTTPPNGLSQILHAKLRKCSKAPSPSMTCLRL
DAENSIGVWQQRAGQRSDSNWVMTVQLGKRDESQVSESALPLPDQSPGGISGPEWR
EEMDKEERVALQMVEELLNRNCPSPPFGVQDHDDDSFFL
SEQ ID NO: 42 PtSHN3_XP_002327422
MVQSKKFRGVRQRHWGSWVSEIRHPLLKRRVWLGTFDTAEEAARAYDEAAILMSG
RNAKTNFPVVANQTRNGQNSPSSSSALSAKLRKYCRSPYPSLTCLRLDAENCHIGVW
QKRAGPRSVSNWIMTVELGKKDGRQAPEQKILISDTSDMAGQEGGSDDGPDDEERV
ALQMIEELLNR
SEQ ID NO: 43 PtSHN4_XP_002324859
MVQSKKFRGVRQRQWGSWVSEIRHPLLKRRVWLGTFETAEAAARAYDQAAILMNG
QNAKTNFPTSHLDQDTNLGKDNNSPLPAKALAELLNSKLRKCCGKDPSPSLTCLRLD
NDNSHIGVWQKKAGSRSSSNWVMKVELGNYNKKTESSPTVEIEPENGTEEEDRIAM
QMIEELLNRN
SEQ ID NO: 44 PtSHN5_XP_002309625
MVQSKKFRGVRQRQWGSWVSEIRHPLLKRRVWLGTFETAEAAARAYDQAAILMNG
QNAKTNFPASHLDQDTKLGKDNNSPLPAKALAELLYSKLRKCCGKDPSPSLTCLRLD
NDNSHIGVWQKKAGSCSSSNWVMRVELGNSNRKSTQVMEELRPSLSSESSSRVEIEP
EINGTDEEDKIAMQMIDELLNCN
SEQ ID NO: 45 MtSHN1_XP_003609337
MVQSKKFRGVRQRHWGSWVSEIRHPLLKRRVWLGTFETAEEAARAYDQAAILMSG
RNAKTNFPITQTSEGDPKSITSNENKPSTSKDLEEILHAKLRKCSKVPSPSMTCLRLDT
ENSHIGVWQKRAGKCSESNWVMTVQLGKKMSVTQDSGSSSSSVAPSSAVATEEEIV
RGEIDEEDRIALQMIEELLNDKNCPSPSINNIKQGDDIDNSFFL
SEQ ID NO: 46 MtSHN2_XP_003597892
MVHSKKFRGVRQRHWGSWVSEIRHPLLKRRVWLGTFETAEEAAKAYDEAAILMSG
RNAKTNFPINVENQTNSISSSSTSSKAFSAVLSAKLRKCCKFPSPSLTCLRLDAENSHIG
VWQKGAGPRSESNWIMMVELERKKSASVPEKAKPEELSKNGLDDEQKIALQMIEEL
LNRN
SEQ ID NO: 47 MtSHN3_XP_003604418
MVKSKKFRGVRQRHWGSWVSEIRHPLLKRRVWLGTFETAEEAARAYDEAAILMTN
SNNKTFATSSSTSTKPNTSLSAILSAKLRKCCKSPSPSLTCLRLDTENSHFGVWQKRA
GPRSDSSWIMMVELERKKKEQEEESEVLPNSDSETLASVVDNEDSEKAVKPENEDEE
GNDKNKGLDEEQRIALQMIEELLNRN
SEQ ID NO: 48 MtSHN4_XP_003603408
MVQQTKKFRGVRQRQWGSWVSEIRHPLLKRRVWLGTFETAEAAARAYDQAAILMN
GQSAKTNFPVTKNQGEEVASDTPYNGGGGDDSFLSPKALSELLSTKLRKYCKDPSPS
LTCLRLDNDNSHIGVWQKRAGPHSDSNWVMRVELGGKKKTIESEEIGSKQHTIDGG
NNSNADNENRVVVEEEERVALQMIEELLNWNYPCGSTSSN
SEQ ID NO: 49 MtSHN5_XP_003588762
MVQRNKFRGVRQRQWGSWVSEIRHPLLKRRVWLGTFETAEAAARAYDQAAILMN
GKNAKTNFPIPKDQTEDANSLTPNCDDNNNSFHTSNALSHLLKQKLTKCCQKQSQSL
TCLRLDADNSHIGVWQKGAGSHSDSNWILRVELGKKHEDSHESNYVSSSEKSAPNN
STIVGDCAEKNGIEHEEDIVTMQMIEELLN
SEQ ID NO: 50 OsSHN1_NP_001046226
MVQPKKKFRGVRQRHWGSWVSEIRHPLLKRRVWLGTFETAEEAARAYDEAAVLMS
GRNAKTNFPVQRNSTGDLATAADQDARSNGGSRNSSAGNLSQILSAKLRKCCKAPSP
SLTCLRLDPEKSHIGVWQKRAGARADSNWVMTVELNKEVEPTEPAAQPTSTATASQ
VTMDDEEKIALQMIEELLSRSSPASPSHGEGEGSFVI
SEQ ID NO: 51 BdSHN1_XP_003563662
MVQSKKKFRGVRQRHWGSWVSEIRHPLLKRRVWLGTFETAEEAARAYDEAAILMS
GRNAKTNFPVPRSATGEIIVAPAAARDSRGGGLGSSSGAGSLSQILSAKLRKCCKTPS
PSLTCLRLDTEKSHIGVWQKRAGTRADSSWVMTVELNKEPAAAATTTTLSDSVAPT
TPSTSSTSASTAGSPPVGMDDEERIALQMIEELLGGSSPNSPSHGLLQGEEGSFVI
SEQ ID NO: 52 BdSHN2_XP_003571428
MVQPKKKFRGVRQRHWGSWVSEIRHPLLKRRVWLGTFETAEEAARAYDEAAVLMS
GRNAKTNFPVQRSSTGDPAPAAGRDVRGGNGGGSSSSSMSNLSQILSAKLRKCCKAP
SPSLTCLRLDPEKSHIGVWQKRAGARADSNWVMTVELNKGVGLPSDVEAQSTISTA
TTSSSVSTMDDEEKLTLQMIEELLSRSGPVSPSHGEDEGDFVV
SEQ ID NO: 53 ZmSHN1_NP_001148685
MVQPKKFRGVRQRHWGSWVSEIRHPLLKRRVWLGTFETAEEAARAYDEAAVLMSG
RNAKTNFPIQRSSTGEPTPAAGRDARSNFSSGSSTTNLSQILSAKLRKCCKAPSPSLTC
LRLDPEKSHIGVWQKRAGARADSNWVMTVELNKDAASTDAASQSTSATTAPPATP
MDEEERIALQMIEELLSSSSPASPSNGDDQGRFII
SEQ ID NO: 54 SbSHN1_XP_002451740
MVQPKKFRGVRQRHWGSWVSEIRHPLLKRRVWLGTFETAEEAARAYDEAAVLMSG
RNAKTNFPVQRSSTGEPTPAAGRDAHSNAGSGSSTANLSQILSAKLRKCCKAPSPSLT
CLRLDPEKSHIGVWQKRAGARADSNWVMTVELNKGAASTDAASQSTSATTAPPATP
MDDEERIALQMIEELLSSSSPASPSHGDDQGRFII
SEQ ID NO: 55 SbSHN2_XP_002438651
MVQSKKKFRGVRQRHWGSWVSEIRHPLLKRRVWLGTFETAEEAARAYDEAAVLMS
GRNAKTNFPVPRTATGELAPVPAARDARGGGGSSSAAAAPGGGTSNLSQILSAKLRK
CCKTPSPSLTCLRLDPEKSHIGVWQKRAGARADSSWVMTVQLNKDVPPPASSSGEEP
VPSDGGAAATTPTSTSTSSTVTTTGSPPPAMMMDDEERIALQMIEELLGSSHSHGMFQ
GAAGSIVI
SEQ ID NO: 56 HvSHN1_BAG12386
MVQSKKKFRGVRQRHWGSWVSEIRHPLLKRRVWLGTFETAEEAARAYDEAAILMS
GRNAKTNFPVPRSANGEIIVAPAAAARDIRGGVGSSSSGAAGASSLSQILSAKLRKCC
KTPSPSLTCLRLDTEKSHIGVWQKRAGARADSSWVMTVELNKEPAAAAPPTPSDSTV
S
SEQ ID NOP: 57 PsSHN1_ABK22668
MARPQRYRGVRQRHWGSWVSEIRHPLLKTRIWLGTFETAEDAARAYDEAARMMCG
PRARTNFPFNPNAPQSPSSKVLSSTLTAKLHRCYMASMQGPRSGSSKKDSMARADK
NNNIHSGNQSLTCLRLDNERSNNIGIWQKKSGSKQSESNWLMKLELDHDQHGNSTL
KRETDDDIAQMIEELLDCGSLEICSPIASADSNINSAESMLN
SEQ ID NO: 58 SmSHN1_Sm92334_XP002969836
MGRPQRYRGVRQRHWGSWVSEIRHPLLKTRVWLGTFETAEDAARAYDEAARLMG
GPRARTNFPYDPNAPPHPSSSTLLSTLSAKLNRCFSSSSSSSSCSTDPHKKDPRVSQSLT
CLRLDPEQSNLGIWQKKSGRQPESNWVMKVHFGSQGGGGVSSDIVLPTDNPAPPQPI
EHKKMKSEEDLATEMIEELLNFPDSSSPSSSTSSSEAKNPNFSSSDLLHHILV
SEQ ID NO: 59 PpSHN1_XP_001762992
MGRPQRYRGVRQRHWGSWVSEIRHPLLKTRVWLGTFETAEDAAHAYDEAARLMC
GVRARTNFPYDPNASKRPNSQMLSATLSAKLHRWYLHSQQRDGQEGKSKDARMTQ
SLTCLCLDAEQSNLGIWQKKTGRQAEANWVRKVQFGDNNSPQTDSPQPENSSESCM
SEEDKFAAEMIEELLGYSPGQFSNFGSPAMSDSSCSSSCSAVTTAFE
Legend: At: Arabidopsis thaliana, Pt: Populus trichocarpa, Mt: Medicago truncatula, Os: Oryza sativa, Bd: Brachypodium distachyon, Zm: Zea mays, Sb: Sorghum bicolor, Hv: Hordeum vulgare, Ps: Picea sitchensis, Sm: Selaginella moellendorffi, Pp: Physcomitrella patens

Illustrative promoter sequences of wax cutin genes that can be used to drive
transcription factor expression in wax/cutin APFL:

SEQ ID NO: 60 pAtCER1_At1g02205
TGGGATCCTCTCCATCGTTTCCATCATGGGATACATTACTTACATTGACTTCATGAACAACATGGGACATTGCAA
CTTCGAGCTTTTCCCTAAGCGTCTCTTCCACCTCTTCCCTCCCCTCAAGTTCCTCTGTTACACCCCCTCGTACGT
CGTTTGTAAAAACACTACTATTTATTTGGATTTGAATATATGCATGCATTTATAACATGGCATCAAATATGTTGA
AGGTTTCACTCGCTCCACCACACGCAGTTCCGGACCAACTACTCTCTGTTCATGCCAATATACGACTTCATCTAC
GGGACGACTGATAATTTGACCGACTCACTATACGAGAGGTCGTTGGAGATAGAGGAAGAATCACCCGACGTCATC
CACCTCACTCACCTCACCACACACAACTCCATCTACCAAATGCGCCTTGGTTTCCCGTCCCTCTCCTCTTGCCCC
TTGTGGTCTCGACCCCCATGGTACCTCACATGCTTCATGTGGCCCTTCACTCTCCTCTGCTCATTTGCCCTCACT
TCAGCTATCCCTTTGCGCACCTTTGTCTTTGAGCGAAACCGTCTCCGTGACCTCACCGTTCACTCTCACCTCCTT
CCCAAGTTTTCCTTTCACGTAAGCATTTTACACGCATGCATATGCACTTTCCCTCTCTCTCGCTCTCTTGACACA
AACGGGTTTACTTATTATGTTGTACTTCACACCACTATTTTCCAAACTTTCACACACAAAAAAAACATTGATTCT
CACTTAACTTGTACGTACTACGTAGGAAGGACATAACCTTTTATACAAAAAGAAAATTAAAACAACCTAAAAATG
AACAATGAACATTTTCTTGTGGGTATACCTTTTGTAAGTTGCATCTAAAGTTTATTAATAATTTTGCCTCATAAA
CATGCGGCGGTAGTATAAATCACAGCGCCACCATGAGTCCATCAACACTATCATAGAGGAAGCTATCCTTGAAGC
AGATGAAAAGGGTGTGAAAGTAATGAGTCTTGGCCTGATGAACAATGTAAGTTTATTTACTTCAAATCCCCCTAA
ATATATATGAATCACTATTGGATAAGTACTGTAACTAATTACACACGCTGGCAAAAGAAAAAAGTAACTAATCAA
CACACAATTAATTAATGAGAGGGAGGAACTAAACGGGTCTGGAGAAATGTACGTGCAAAAGTATCCGAAGTTGAA
GATAAGACTAGTGGACGGGAGCAGCATGGCAGCTACGGTGGTTATCAACAATATTCCAAAGGAAGCCACGGAAAT
TGTCTTTAGAGGAAATCTCACAAAGGTGGCTTCGGCTGTTGTCTTTGCTCTGTGCCAAAAGGGCGTCAAGGTTTG
TGAATATATGAGGGAATTGGAATATATATACTCAGCTTCTCATATCAAACAAAAAATAATGTAGTAATGTGTATA
TATAGGTGGTCGTGTTACGCGAGGAGGAACACAGCAAACTCATCAAATCTGGGGTTGACAAGAATCTGGTACTGT
CTACAAGCAATAGTTATTACTCCCCAAAGGTGTGGTTGGTGGGGGATGGAATAGAGAACGAAGAGCAGATGAAAG
CAAAAGAAGGAACCCTCTTTGTTCCCTTTTCTCACTTTCCGCCCAACAAACTCCGCAAGGACTGTTTCTACCAGT
CCACTCCAGCTATGCGTGTTCCCAAGTCTGCCCAAAACATCGACTCCTGTGAGGTACATCTTTGAATTCTTATAG
ATATATCTGTAACTTTTATATTATATAAGCTGATAGATGTGTTCATCTATAATGAATGAATGGTTGTTATATATA
TATAGAACTGGCTGGGGAGGAGGGTGATGAGTGCATGGAAAATAGGAGGTATAGTGCATGCACTTGAGGGTTGGG
AGGAGCATGACTGCGGCAACACTTGCAACGTCCTCCGTCTCCACGCCATATGGGAAGCTGCTCTTCGCCATGATT
TCCAACCTCTCCCACCATCTCCTCTATGAGCTTTTTTCATATTCATACATCTATGTCCCCTTTCTTGATTATATC
TACTTCCCTTCCATCATTGTTTGCTGTTTACTATGTTTTTCTATCGACAATATATAAGTACCCTTGTTACCCTTG
GTGCCACGTGCTTCATATATGTTAGAAAGGGCAAAAAAATTCGTCGTATGATATGCTTAGTTAAATTTTATAAAA
CTCAATAAAAATCTTCAGAAACAGTGCTATGATCATTACATCTTAACTAAGTGATATATATCTGCGTGCCTATTT
AACAAAATAAACAAAAAAACAAAACAAAATATATTTGGGTGCATCATCAAATCAAAGTAGTTGCAAAAACTGGAC
GAGGTTTTTACTTAAATGGTCCTTACCCCGCATGGTCCACTTGCTACCTAATTAAGGATTGGTAGGGTGCGTATA
CGTATATAAATTGTGGCGGTGGGAGATGGAGTTACTAAAAACGAAACGTACAAGTATTATTCATAGCTCTCGTAT
AAGGGGTTAGTCCTTAGATCTAGATATTTTCACTTTTCTTTCATTTATGTCGGAGCAACAGACACTAGCTGGCGC
TTCAACGTGCATGATCTTGATTGGCTAGTAAATTCCAAGCATCAATACCTAACACATGCCCAACTTGGTTCATTA
GTATTCTTTCATTGGTAAAATACCCTTACCTTTCAATAATATCCAGAAATAAATATATGAAGCCATCCATCAACC
GGTGCATTTCCTCAAGGCATGGATATGATATCAGAACATCGATGAAGGTGGGAGGGGGTAATTAGCTGAGTGTCA
TAAATGAGGATCCATGTGGAGATCATCGAATGGTAGTAGTACATGTTTGGTCTTAGCTGGCCCCACCACAAGGAA
TTGGACTGGTGGGAAGATAGGGGTGGTTACGTCATTCCACATATCTACCAATTAAGGAGTTTAATATAAACCTTG
CTATATAATGTACCTTGGCTCACAAGAGTTGAAGAGACACAGTGACGACACAAACATATTACATTCGACGGTATA
SEQ ID NO: 61 pAtCER2_VC2_At4g24510
ATCGTACTAAAAATCTGGGAAGTACACTGATCCGATGGAAATGAAGGAGAAGATTGTACATTTTATCGTGATGAT
TCGTCATAAACTGAGACTGGAGAGAGCGAAGCTGAACAGCTTTAGCAGCTGAAGCTGCTTCCTCTTCTGGCTTAG
AAGCATTCCTTGGACGACCGTGCATTCTTCTCCGACGACTGTGAGAGATGCGACAGTGTGATTCAACTTTTCCGG
TTAAATCTGATCAGAAATTACGAAAACAGTTAAAACAAACACTAGATCGAGGAAAGAAAAAACGTGATCCAAATC
TAGAAACAACAGAGATGACGAAATGGAGAATAAGAAGCAGATCACCTGAAAGGAGCACGTTGCGGCGTCGATCGA
GAGAGAGAGACTTTTGTTTTCGGGCAATTGAGCGACTGAGAGAAGGTTCTATCGGAAAATTTAATGGGCCGGTTT
AATGATTTCAATCGCTTAAACCAGTAAACCGGGTTTAATTGAAAAATACGGTCGAACACTAACCCGGTTTTGGAA
GTCTTCGTTTATGTAGTGAAAGGCTTCGTCATCATCGTTGTTTCACAGTTGAAGGTTTTCACGAGAAAGTGAAGA
TTTTTGGAGAAACCATACTTTTGTGAAGGTTCGTTTCACCTTCAATTTCGTTTTTCCAATTTGGGTATCCGATAA
TTGTAAGAATTTGGGGTTTTAAGGTCAGATTGATTATGTATCTAATGCTTTTACATTGTAGTAGCTCGTGTTTTG
GATTTTGAAGGATTGATTTCTAAATTTCCTTTTGATCTTGTAGTTGAATCACAATGGAAGATTCAGAGAAAAGAA
AACAGATGTTAAAAGCAATGCGAATGGAAGCTGCAGCGCAGAATGATGATGATGCTACTACAGGTACTGAAACAT
CTATGAGCACAGGTCACCTCTCCAATCCATTGGCAGAGACATCCAATCACCAGCAGGATTCATTTGAAACGCAAA
GGTTTGATTATTATACCGATCCCATGGCTGCTTATTCTAGTTTCAAGAAAAACAAGACCCCTAAGCAACAATACA
TCTCATCTCCTAGTCATCAAGGAAGCTCTCCTGTACCACCTCAGTTTCCACCATCAGTTCCTCCAGGTGCTTGTT
TCTGCCTTGATAGTCAATGACTCTGTCTTAATTTTTGTTTTGTCTATATTCTTGTGAGGCCAAAGAAAGTAGTCC
ACTGATAAAGAAGATTGCCTAATATCATGAGAGTTTAACTTACAGTATGTTAGTTGGTCCTTGGTGAGTATAGGT
ATAGGATTGAACAGAATCAGGAATTCACTTTGGTATTTGGTTGTTGGGCTTTCGTAGAGTTAGGTGATGATTCTC
TTCTACAAATCTATATGAAATTTTTGTTCTTTGTTTGGGTTTAGTCATGTGTTCTTGATTATAATCTACAAATCA
AGATCAATGGAGGAAGAAATTTGTCTCTCAGTCTCAGGCTTCAAACTTATTAGCTTTAGCTACTTTAATTTGATA
TATCTCTTTAAGTTTCACTTTCTAGGAATTGACAGTATGAAAATCACATCAATTATGGAATTCAGTTAGGTTTGT
GTCCTGTGCCTTGCAATGAACAGTAATCCAGTTCTGATCCTTGCATTATAACTTTGAACAGGATCATTATGTAGT
GAGTATCAGGCACAGACCAATCATGGTGGCTTTCATGCAGCTCATTATGAACCAAGAGGGATGGCACATCTTTCA
CCCTCACACAGAGGTCCACCCGCCGGTTGGAATAACAACTTTAGGCCTCCACCAGTTAACCATTCAGGTCCACCT
CAATGGGTACCTCGCCCTTTTCCATTCTCTCAAGAAATGCCGAACATGGGGAATAATAGATTTGGTGGTCGAGGC
AGCTACAACAATACTCCTCCACAGTTTTCCAATTATGGACGACAAAATGCAAACTGGGGTGGAAACACGTATCCT
AACTCAGGAAGAGGCAGAAGTCGAGGACGCGGTATGAACACAAGCTTTGGGAGAGATGGAGGAAGAAGACCCATG
GAACCAGGGGCAGAACGATTTTACTCCAACTCTATGGCTGAAGATCCATGGAAGCATCTTAAGCCAGTCTTATGG
AAGAATTGCTCAGATGCTTCGAGCAGCAGCTCAACAGGTCAAGCCTGGCTTCCCAAGTCTATAGCACCAAAAAAA
TCTGTGACCTCAGAAGCTACCCACAAAACTAGCAGTAATCAGCAGAGCCTTGCTGAGTACCTTGCTGCTTCTCTA
GATGGTGCTACATGCGATGAGTCAAGCAATTAATCAGGACAACTGGCCTAGTGAAAATACACCAAGTCCAAGCAT
CTGAGGTACCTGGAAAGATCACCGTTGACTCTTTCGAACTAGGTATTGTTCAGTGACTTGTGTTTATTTTCTTAA
CAAGACACAACAGCGAATGATGAACATCTCTGAGGGCGCAATTAGGAGTAGATTGGTTGGCAATAGGGATGTTCT
CTACCAAAAATTTTACTGTTTTTTCGCAAGATTTAGTTATCGTACAATTATGTAAAATCATTATCAGGAAATTTG
TTGCATGATTGTGTTTGAGGTGGAAATGAACCGCATCCGTATTAAGATCATTTTTGCTGGTGGAAACAATGTTAC
CAGGAAACTGAACTTGGTTTTTTATAGATTAATGTGACTTGTTAGGTACCGTAATATAATACTAGTTGGCTACGA
CACGTACATGTGCGTTTATTGCTTGAAGCCAATAAGGACAAGGTGGACGTAATAAAGTGTGCTTGTTGTTGGATG
GATCTGAATATGATGACTCAACTGTCCAACTCTAATGTTGTTGCTAAAGACCCAAATCCCACCCACATTTAATGT
TGCCGTCACGGAAACAGTTTTCCCAACTGTCCTAAATCAGTGATACCCATGCCTATTCTGAACTCAACTCTCTTT
CGAAACTCAATCCTTATATAACACATCCCATTTAAGCCTATAAGCTACACATATCAGCTCTCTCACAAAAATAAA
SEQ ID NO: 62 pAtCER3_WAX2_At5g57800
ATTTTAAGAAATTAAATCTTTTTTTTTGGTATCTGTGTGTTACTTTTTATAAATGTATTTTGAAAAGTATTATTT
CAATTTATAGATAAATATAATTATGACTCTCAAGTGGATTTTTTTTTCACGGTCAATTGGAGTTTGGCTGTGAAT
CTTGTGAATAATATCAACTAATTAAGAGTCGGCCGATACTCCGTATCTTTGATCACTTTCACCCATATCTTGAAA
TTTACCAAATGTTTTCTTTCATTGGGGTTTCTATACCTTTTTTTTTTGGTTCTTTCTGTAATTTGGGTTTTAAAG
AAAAAACCTATAATTACAAAAAAGGTTAAAAGTTAAAACTAAGCACGTTCAAATATGTTCTTTCGAGATCCCACC
TTCCTGTCTATCTTATAAGAAGTCGAACACGTGTGCTCGTTGTGTGAATTAGAGTGGTTATTTCAACATATATAA
TTAAACTATGTATGTATCATAAATACACTGAATATGTTGGAGTTGGGTCTTGTGGTAGGCTAACTTGTTCGCTTC
ACTTTGGTTTAGTTTAGCCTTGTAATCGGTGGTTTCATATACTGAAATTTTTAATTTTCTAATATAATCCAGATG
ACAAAAAAAAATCATAAATACACTGCAATGGCCATTTTTAAAAAAACTTTAAACGAAATATATATACATCACCAA
GTATCAAGTAAGTAATTTGGTTGTTTTGATTTTTCAAAAAAACATTTAGGTGATTCTTTTAACAACCAATCATAT
ATGTAGCAAAGATTAATTATGTCAATCTTTTAACGTCACTTATATAGTTTAGCTGTAGTATTATTGTAAGCCAAT
TGTACGGACTTCGTAACCGTTTCGACAAAGATACAAACTAATCAATGTTTAAGATGGCATAATATTCCGACTTCC
CCTGCCACTCGGTAGTACTGCTGCGCCATCCTACAAGAAGCACTCGTAAATGAGTGGTTAGACGGCCAAAAATTA
GCAGGATTCAATCCTTGATTAAGAGATGGTTCAGATAAGCCCTCTAGGCCTCTACTCGTCACAATTCATATATTA
ATTGATCACACTGCATGAAATGATAAGATCAAGTCAATTACCTCAAAATTAATTGAAAGATAAAATGATAAAGCA
ACAAGTAATGATCATATATGGATGTAACAACCTTCTTCATCCATACGAATATGATAATTCTTTTGTCGATCATTT
GCCACATCTATTTAACTAAGTATTTTGTACATTAAGATCATTTTGCGAGTATTCCCGCGTTCCCAACAAAAACGA
ATTGAAAAACTACATAGGGTGAATTTTGCTCTCGTGGCATTAAAGAGAGAGGCTGACATTATAGATTATGATATA
TTTATTATTTTTCTTAGTAGATTTCTTGACCAGCCTTTAGATATGCTTGCTCTGTCATGGCATAAAGCCTTAAAC
CCTAAAGCCCTTTACATTTGTACAGTACCAACAATTGTACCCAATGTTAAATGAATGCGGATTAATTTGTGATAT
GAGACCATCAAAATAAAATACTTATAAGATAGTAGATATATAGAACCGTAACAAAAAGATGAGAAGAAAAAGACA
AATTGAATAGAAACTGGACCAAAAGATAAAAGAGTATATGAAGAAGCAAGCCACCAAGAAGTGTAACCATCGTTG
CTTCAACTGTAAACCGCACATTAAATGTGTGTGAGAGAAAGAGAGATAGACTCCAGCTGTGAGAGCTACGTCCAT
TGCATCAATTGGGTTATATGTCGTTAACAATTTTTTAAAAATACATAAATAAATCAATAAAATATTTAGAAAAAA
TCAATATTATAATGATATTTTGAAGAAGTTAGGTCCATAATGGAAATATAGAGACTTAGTGTCTATTTATCAAGA
AATAGTGTCTATTTATCAAGAAATAATGTCTATTTGGTCCACAATTATCATATTTTTTGTGGCCACTCAAACTAC
GAAAATAATGAATATTGTTAATTTTTGTCTTATTTAAGTCTATAACTAACTTACTAATTCGGTTGAAATTGCTAA
TATGCATTTTCCTTGGTCCACTATTACAGTGCTACTGCTGTCTTATTCTTGAACACAAAATAAAAAAGATTTCAA
ACACAAAATATGCATTTTTTTGTTCCACCATTACAAACCTTTATTTGGAGAAGTATACAGTTGGATATTAAATAT
TTTAATTAAAAAATTGAAAATATTGAAGTTCTTTTTCTCCAGTATTTTGGCTGGAGCAAAACTAAATAAATTCCA
AATTAAAAGCTCGAACGGAAAACATTTACTATGCACCAAAATAAATGTTGATATGAAATTTGCATCAGCATATAC
AGTATGTATGTAGTACAATTGAACAGAGTCAAAATTAATTGTCACTGAAACAGTCAGATTTTATTTCTGTTAAAA
AATATTTTCAGACAAAAAATGATTTTTTAACGTTTTTTTATATAATTTTATTAAACCTCAAAACATTCCTCAGCA
GATTGTTTTATAATGTTATTATTATTTTTTCTTAAATAATTTTATTTGAATTTCGTTATAGAGAGATAAATAAAA
GATTTTTGGGGTCTAGTTGGCTCTCATAGTTTGAATGCTTATATAAGGAAACAGAGCTCGAGGCTCTCAATAATG
CCACATAAAACACAACACCAAAGCCTTTATAACTCTTTCTGGGGTTTTTAATTCTCTCAACGAACAAAAAAAAAA
ACTCAACTAATATTCTCCATCCTCTTTCTTCAGATTTAAGAGAAACCTTATCGTTATATTCTCTCTTCTCTTTTC
TTTTTGACTCCCACAAGAAGAAAGCAAATTTCTTTTTCTCAGGATTGCTTGAAAACTGTAGAAATCTTTAAGGTT
TTTTTACACCAATAAGAGTCAGAGAGAGAGAGAGAGAGAGAAAGAGAGATCTATTCATAAAAAAGACAGGTAATC
TCAACTCCGAGGAGATAACTGATATAACAATTTGAGAGAATAAGAAGAAGAAGAAGAAGAAGACCAAGCTAAAGA
SEQ ID NOP63 pAtCER4_FAR3_At4g33790
TTCTTCAAGGAACAAAGATCTATCTTTTGGTTGCGTTTACATAGTGTTTACGTTCCATGTTATAATTATTAGCTC
ATATTAGAAACCCAGACGTAAACACAAACAAATAATCATGTCACTATACAGAATTTACCTAGTATAGAAGTCCAT
GATTTTTGTTCTTTTTACCTTTTAATAGAAAAGTTTTGTTCTTTAGTTTTTTGGGATTTAACATTCGTTTTAATA
TATCTTGTAGATGTTGCAGAAAAGTGTTGGTGGTAATAAGATAGAGCAAACCTTTCCAGAAAGTACATTGGATTA
CTCACAAGGCTTCTCGGCTACTCAGTTTCAGGTTTCTCTCTCTTCACTATCTCTCTGTTAGGTTCTGTTGAGTAC
ACGTGACTTGTCTCAAGAATCTCACTATATATGTCTTTGGGTGTTGAAACAAGCAGGACAAAACAGCATTCCAAG
AGCAGTGTGGTTATTTGCATATGGAAACCAGATTCTAAATAACCAGTTCAGTAATTTTTTATTATTATTTCTGTA
GATGTTCAACTACTTTGTTTATTCTTACTTTATAAAGAATATATCAAATCTGACTAAAATTAACTTTGAAATTCG
CTGGTGAAGATCAAACTGATGAAGAGCAGCAGCTATTTTGGACATTTGTGAAGCTTTTATGGATTCAACTTGAAT
CATTTCAAGCAGTGATTAAAGTGAAACTTTAACGTCCCAAATATGAAAAATAGGAAGGAGTTTTAAGCAAAAGAC
TGATATAGAACGAAAAAAAAAAAGGGTTCTCAAATCTCAACTGGACTGATTCTTTTCTCTCTTTTGCTTTGTAAT
TTCGTCACAAACAAGTTTTCCTTGTAGCCGCCTTTATGTAACTCGTGGTTTACAAATTACAACACTTCACTTCCA
TTGCAATTTTCTTTCATAGTATAACAAATTTCAATGCCTGAATAAGCTTTTTTTTTGTGTGGGGAAAAAAACTTC
CAAGAAATATCTAGCAAAACAAATGATCTTAATGGTTCTTTTCAGAGCTGCTAAATTCTCAAAAGAATAATTCGA
AGTAGATGACAAAGAGGGCATATTCAAAACTTATAAAGAAACTAATAAAACGTATTACTTTAAATAGAGCACGAA
AACCTATATATAACCAAAATGCTAACCCTAAAAGTAACACTTGAAGAATGCGTAACACTAACGCAATAAAAGGGG
AAAATAGAAACTTATCAAAATCTGGTTATCGGCTTGTTTTTATAGTCACTCTTCATATGCATCAGTGTTTGAGAT
TCTGCAGATTGTTGTAGCAGATCATGTTTAAAGTCCGTTATTTGTAGCTCTTTTGAGTTACTAGCGATTTTGGAG
GTGTTAACCGGCCCAAGCATGAATAGGCCTGATGGTATTCTGGTCCATCTGAGCTTGGCCGAAGTTAATTGCAAA
ATTAAAATTAAGTTTATATTATTATGCTTTTGTCTATCTCTTGACTTTAATTAATCTTTTAAGGTTAATTGGTTA
TTGGTAGTTGAGGGTGTTTCAGTTAACCTTAAATAAAAAACTTAATTGACTTAAATTATAGTAAAAACCAAACCA
AACCAAATAGAGATCCAAATTTAAATGTACATAATCTACCACTTTCATAATGTAAAAATCCAAGTGTTATCAGCT
GCCGCATTTGTTCTGTCTTCTATATGTCGAATACGAGTACATAAACTACAACTTTGATAATCTAATTTTAGGATT
TTAATATGCTAGGCTGTTTTGCGTTTGTCATGAGTAGGGTCGAATCATGCCTTAGCCAGTCGTACTAGTATAGAT
GGTTGTAAGTTGGATTTGATGACAACTGCTTTGGATTTGATGACAAGTAACTACTTAAAAGCAATGGTTAGGCAG
ACATTAAATAGGTGGTGATCTAATGTCTAACATCTAAAACGTTTTAATTGGAATTTAAACGAGTTTAGATGGTCT
AATTAAGCGTTTATTATGTACATAATAGAACGTATAAAATATCATGATTCACAGAAGTAAATTTAAAATGTTTTA
ATTTTAGAAGTAAATTTAAAATTCAAACTACATCAAAAATTCAATAGAAATCAACTTAAAGATAACCATAAAATC
AATTCAATTGACATCAAATAATAGAAGCCATCTACTTTTTATGTTATAAAACTTATAATGAATTTTATGTCATTA
TAAATCGAAAAACTACACTGAAATGAACAAAAAGTCAAATGACAACAGATTAATGATTATGTAAACTGTATAATG
TCGATTAAAACCACATAATGCCATCAATTATTTAGCACCTATCAAATAATTGTCACGGTTGTATATATGGCGCGC
CTAGACCGCCACTTAAAGCGCTATTTCAAGTATTGTTACAAACGAAGAAGGTAGGCGGTCTAATTTTTAAGTCTA
AAATTAGATATCTTTGGACGCCTCATATTACTTATTGTTTTACTCTGTCGGATCCTATCTCACCCAACCATACAT
TTGTGGCAACAGAAATTGCCTCCAAATGCAAAAAAAAAAATCATTCTTTCTACTGTTAATACTTCGAAATATACA
ATTTTTAAAGTTAATATGTGTTTAAATACCATTTTGATCTAAATTTTGTGTTTTGTGTTTCTTTCTATATATATA
TGTACGTTTTCCATTATATCAGAATCGAATCATATCTAACCATATATGAATTAGTCTCGGTAGTTGTAATTTGGA
ATATTTATTTCGCTTTTCAACGTTGGTAGGTTCAAAAATACTTAAGTTAAGCCACGTTTAATTTAAATACGTTCA
TATTTAGAATATGTAGAGTTGAAATTTATAACTTAAGTATATGTTATGGAATTTGTTGACAGCTATTTTAAAGTA
GTTGGGACAAAACAAAAATGTAGGTAGGTGCTCACATTAATTTCACCTTGTAAAGCCTAAAACTATAAATCTTAG
TAACACATATGTGATATGTCAGTTGTACTCTGTTGCATTATTTCTCTCACTCAAACGTATATACAAACATAAATT
SEQ ID NO: 64 pAtCER5_WBC12_ABCG12_At1g51500
TATTGTGAAGCTAATTTTTTTGCTTAGTTATGTTGATATCATTTTGCCTTTTGGTTTGTTATAGTGAAGCTTGAT
TTGTTGGATTGTTGTCATGATGTAATTTAGAGATGAATGCAATACTGTTTTGTCGTAGATGTTGACTTTACTCTT
TGACATGCTTTGTGTTAATCAATGTAATACTGAATATCTGAAATTGAGAGCCAAAAATGATAAATTTATCTTTGC
AATGTTACATTGCTTTTAAGAGGGAGATGTAATATTCTGTAAAGTGCAATGCTGTTCCCTAAGGACACTTCGTTT
AAGTTACTTCAAAGTGTCAGAAATGACGGGTCGAATAAGATAAGCTGTCTTCTAGATGCGAGTTTAGGAATCAAA
TATTATTTTTCTTTAGTTTGCTTGAGTTCTCATGGAAGTGGAAGTAACACTTTGCTTTTGTTTTTTTTGATAAGG
GATATGCTTTGATAGAATATGAGAAGAAGGAAGAAGCACAGAGCGCTATTTCAGCAATGAATGGTGCTGAGCTTC
TAACACAGAATGTTAGCGTTGACTGGGCCTTCAGCAGCGGTCCCAGTGGTGGTGAATCTTACAGGAGAAAGAACT
CGAGGTTTGTATCCTAATCTCTTTTCTGTTCCGCTACGACTTGTCTGATCTTGTGCCGATATGAAGTCAAGAGTG
TCAAAAAGTATCAATTAAGATATAGACTTAGAAGTTTTAACAGTTGACAAGGTAGTATATTGTACTAAGCACCTA
CCAAACTTTACTGTCTTTATGCTAATGAATCGAAATCACTTGTGACTTGTCAAGTAGTTATACCTTTCTTTAAAT
CATCATCCATTGATCATTGGGGTTTTACAGGTATGGGAGGTCGCAACGTTCAAGAAGTCCGAGAAGACGTTACTG
ATTGTATGATTTGGTGGAGAGTTCTCCCCATATCTCTCTGTATTAGGGATTCCCTCTCTTATCTGTAAGGTACTG
ATGCAAGACGCTGAGTGTTGAACAAATTTTTTTCTGGGGTTTTTGTAGGGTTTGGCTGCTTTTGCATTGGTTTAT
CTCTTTATGCATTTGCATGGGATTGTTGCGTTTAAACACCATGAGATCTGTTTTAATGCTTTGTATTGGTAAAAG
AAGAGAAACATTGGATGAGGAAGAATGTTTTAATTTTCATTCTCTTATTGATTCATATTTAGGTCAGACAGAATT
TGAAAATCAAAGACCTTCCATTACACTAGAAAACCAAATATGATTATATAGAAAAAATCAAAGAATTTTCAACCA
ATGGCATTATTTCACACTGGTTTATTATTCTAGGCGTAACTATTGGTAACCTAAATATGTTAACAGAAATCATCA
AATGACTATTAAATATTTTGGCTGAAATTTTCCAATCAATGGCAATATTCACATCGTTTGTTTTTATAGGCGTAA
CTATTCGTATCCTAAATATGTTAAAAGAAATCATCAAAGGTTTGATGATTTGAGATAGAGCATGTACTTTCTTGC
TACTCACAGGTTGCATGATTTCATTTGTACGAATCAATCATCTATACTTTGTGCATTGAGCCAGTCCCACATTAT
GTTTATGTATCCATCTATTTTAAGGGCTCTCATATACTAACTTACAGCTGAAAAGTATAAATATGAAACAGTTGG
AACAGTTATATAAGTTCTGCTTTTGTTGTCACCAACAAAAAAAATGATATGCTTTTACATGATTCCAACAAAAAA
AAAACAGTTTTGTATTCTTGTTAATGATGGTGCCAAAGGCTTATAAGACCATACCTTAGATTCTGTTGAATTTAG
AATCTGGGTTTCTATCTCTTTTCTGGAAATCTTGTTTCTTTTTGTTTTCTTTTTATACCAAAACTTTGTGAAATC
TTAGGTACTTTTGTTTAGTATCAGTTTACTCGTTTAAAAAGAACCAATAAACCTACTAGATATAAATAGTAAGAA
GTCTATAACTTAGGGTTGTGTTAAATACTAAACAATGCTTAAAAATGTGGTTAGACATAGCGCTATACTAAAGCT
AAAAAGCTAAAGATAACCATAAAATCATGAAGATAATAAATGGACGGATAGACCAAAAAGAAATAATGAAGCATA
ATACAAAAAAAAAACTATATCGGTTCCAACTACCACACATTTAATTCCTTTCCCTTTTCATTTAACACCTGTGAA
GACTCGTTGCGAGGGTTCTCTACCTCTTTATGTCATTCAAACTTATCAATTATCAAGTCTCTTGATTTTACATGT
TCAACCAAACACGATTTTTCAAACTTAATTTTATATATCTTCTTCATTAATTATCGAATATCACTTCTCTTGCTT
ATAGTTACAAAAACTAATACAATGATAATTATATAATTCTATGTGTGAACAAAACGATAAATTTGTCAAAGTATC
ACTATCAATCCCTTGGAATTAGTAGACAACCAAATATGGATCCTTTAATTGATTTGTGATGTTTCTATTCATTTC
GAACTAAATGAAAACATCTCATCGTAAATAATCACACTGTTAAATTTCATTTCACAAAAATATCATTTGATTTCT
GTGTGGACGAAATTTCTTGTTAGTTGGCAAGAACCGACATAAAAAATATATTTCATACGTATAATAGTATGTCAA
TAAGTAGGTGGTTGCTTACTAGTTACTACTACACATGGACGATTGTATAAATATTAGACCTCATTCACACAACTC
TCACTCTCTTACATTTAATGTGCAAGAAAATAAAAAAAACTATATACTATAGACGTGTATCTATATATGGTTATG
ATATTAAAGCCATCCATTAAATGTAATTAGTTGTTTGTTGATTGTTGCTCTCAAGTCTCACCTAAAGAAAACCTT
AGGCCTACAAAAATTAATCACTATCTTTATAATTCCATCTCCAACCAATATAATAAAAATAACCTAGACGAAGAA
CAAACAAAACTCTCTCTTTCTCTCTCTCTCTCTAATAAGTAAGGTTTTGATCTTTTTCAAGATCAAACAAAAACA
SEQ ID NO: 65 pAtCER6_CUT1_KCS6_At1g68530
ACTAAAAATTAAGGGAACTTGTCTTTGATATTTTATTTACTAGTTATATATAGTCCTTACCGAACCTCGTCGGCA
ACATCATCAGTGCGATCAAGAATCGATCACCATTAAAATGCTTTATTGAGCACGATCAGTGTTCACCATGTAAGA
AGATTATTGTCTCACAATTCAAATCAAACCTAGCCTAGGCAACAAAAATTAAATTTCTTTAAACAATAGAACAAA
ACTCGTCCGCCCCAACCATCCTCTTCACAACATTCCTTAATCTTACAATATCTATATAACTAACGCATCATTTGG
ATTTCACTATGTAACTAAGTCGAACTGGTGTGAAATAATTATAAATTTAAATAAATAAAAAGGTGAAAATATGGT
TGTACACGAAGGTATGTGAAATAATTATGAATAACTAAAATGTACTGAATTATTTATTTTATTTTAATAGCAATG
GAATCTAAATTAAATCAGGATATAATGAAAATTTTGTAAAATTGTGATTAAATTGTCATTCCAAAGAAATCAGAG
AACTGTCTTTAAAAATTTGGAAGCGAGTTTAATGATATAGCCTATATGAATGGTACAGTGTGAATGTCTCTGAGA
AAAATTACAATTCCACATTTTTATTACAGACTAGATGAGAAAAAAACATTGATGAGTAGGTCAAATTAAAAAACT
ATATTCACGTTTTCGGTGATACATTGGAAAACCATATAAAACGATCATTTTTCAAAGGAAGAATAGAAACTTTAT
TTACATATTTAATTATTATGGAAGATGAAGGAAGAACTTTATCATAGACTACGAAATCGGTGTGGCTAATGAAAT
ACAGACACCTTATATATTACATATTAAATGTACATTTCAATCTGGTGGATAGTTCCAAACTAATCTTCTTCATCA
AATATTGTTGGCATTAATGATCTCACTATGGAACACGAAAATTCAGCAATGTTCATTTTTAGTTAAGAAACAAAT
CCTCTTACGAACTCTGTAAGATCTTGAAGGATCAAAAGCCTTTGATCTCAATTTCTGTATAGTTTTTATTAGCCT
AGTGCTTTATATATGTTTGATACTTCTGTTTGGCAATATCAATCATAGTAGAAAAGATATGGACTTCATTTGAGG
TTTTTGGTGGATTGTGTCTATATGTGAAATCATGGGATCTCAAGATTTGTCTGCATTCAGTTTCCAAGTCAAACA
TCGTAACTACTGTTTGATTTTCCCTCATGCTTGCAGTTTTCATGGATATCTCAAGATTTGTCTTCTTGCACTTTC
CAAGTCAAACATAAAGTAACTACTGATTGATATTCCCTCGTGTATTACCCTCTTTCAAATGACACAATTGGGCCC
AAGTAGAGGAATTTCATAGTGAATTCAAAAGATTAACTGTATTCCACCGTCGTATTTTGATAACATTTAGTTATT
CCTTTTCTTTTTTTTCTTCTGCAACAGTTTTTTTTTAATACATTTAGTGTTGGTTTGGTTCAATGAAATATTATA
TGTTACTTCTTTTTTTGGAAATAAATTATTCATTCTTTCTACTATAAAAGGAATTGTTCATGCTTTTTTGATACA
ATAGTATACCATTTCAAAAGATACCATAGACCAGTTATTACATGAATCGCCAAAACAACACTAAAATCAGAAAAT
CAGTATATTTTGGTATAGTCTCCAACATACAATCATAAAACCTCTGTGAAATTTAAAATCTATATTTGACATTTC
AAAGTTTAACAACATAGTTCTAAATAATTACCTAAATTTTAAGTCAAATGTGAATTATATTTTACTCTTCGATAT
CGGTTGTTGACGATTAACCATGCAAAAAAGAAACATTAATTGCGAATGTAAATAACAAAACATGTAACTCTTGTA
GATATACATGTATCGACATTTAAACCCGAATATATATGTATACCTATAATTTCTCTGATTTTCACGCTACCTGCC
ACGTACATGGGTGATAGGTCCAAACTCACAAGTAAAAGTTTACGTACAGTGAATTCGTCTTTTTGGGTATAAACG
TACATTTAATTTACACGTAAGAAAGGATTACCAATTCTTTCATTTATGGTACCAGACAGAGTTAAGGCAAACAAG
AGAAACATATAGAGTTTTGATATGTTTTCTTGGATAAATATTAAATTGATGCAATATTTAGGGATGGACACAAGG
TAATATATGCCTTTTAAGGTATATGTGCTATATGAATCGTTTCGCATGGGTACTAAAATTATTTGTCCTTACTTT
ATATAAACAAATTCCAACAAAATCAAGTTTTTGCTAAAACTAGTTTATTTGCGGGTTATTTAATTACCTATCATA
TTACTTGTAATATCATTCGTATGTTAACGGGTAAACCAAACCAAACCGGATATTGAACTATTAAAAATCTTGTAA
ATTTGACACAAACTAATGAATATCTAAATTATGTTACTGCTATGATAACGACCATTTTTGTTTTTGAGAACCATA
ATATAAATTACAGGTACGTGACAAGTACTAAGTATTTATATCCACCTTTAGTCACAGTACCAATATTGCGCCTAC
CGGGCAACGTGAACGTGATCATCAAATCAAAGTAGTTACCAAACGCTTTGATCTCGATAAAACTAAAAGCTGACA
CGTCTTGCTGTTTCTTAATTTATTTCTCTTACAACGACAATTTTGAGAAATATGAAATTTTTATATCGAAAGGGA
ACAGTCCTTATCATTTGCTCCCATCACTTGCTTTTGTCTAGTTACAACTGGAAATCGAAGAGAAGTATTACAAAA
ACATTTTTCTCGTCATTTATAAAAAAATGACAAAAAATTAAATAGAGAGCAAAGCAAGAGCGTTGGGTGACGTTG
GTCTCTTCATTAACTCCTCTCATCTACCCCTTCCTCTGTTCGCCTTTATATCCTTCACCTTCCCTCTCTCATCTT
CATTAACTCATCTTCAAAAATACCCTAATCACATTTTGTAACAATAATACAATTATACATTAAAACTCTCCGACG
SEQ ID NO: 66 pAtCER10_ECR_At3g55360
CCTTTGCATGGCGAGATTTTTTATCCCGAAAGTTCAGTCTAAGAATGATGTAAAATTCCTCTGTTAAGAAAAAAA
TGCCTTTAACAAAATAAAGAATTCGATGTTGAAGAAGAAGAATATATATATTTTGGTGCTAATTTGCAGCACAAG
ATATAAAAATTAGAAAGTATAAGCCAAAAAATCAAATCATGATTCGACAAGGTTGTTTTTAATTCTTTCGTGATT
CTTGATGTTATACCCCTAATATAACTTACCGATAACATTGAATTAGTGAAAAATATTTCGAATTATGATCACCAG
TCTCTATATTATATTTGATGATTTTATGGTTACGAATGTGAGGGGTACGTAAGATTAGTAAAGACGGACATGTTG
TAGGAAGGTGTCCCAGTCCGCGATTTCTAAAAGAAAGATTTGTGGTCCAAACGTAAAATTTAATCAGACCTTCTT
TTTAATGGACCTCACTATGTCGACACACAACATCAAACATATCCCTAACTATATAGTTCATAATCAAGATGTTTT
TTACCAGAAAAATATAACATCAAACATGTCTCTCTCTAATCATTATATTTATAAGTTTTTCGTATCAGACTAAGA
AAGTATATATCAACCTGAGACAAAATGATCCGGTAAGAAGAACTTCAATTTAGATGACAAAACTTCCAATTAATT
TGAATTACTTAGAAAGGGATGAAGTTGAGACACAAAGAAAGAATATAATAGATATATTGCCTTAGCTTGTAATTC
ACAGTTTAGTTGTTTCAAAGAGCAATATCATTGGAATTTCGTAGTAACCAATATATATTGTGGTTATATATTTGT
GGGGAGTGTGTATATGTATTTGATATGTTGATATTTTTCTTCAAAAGACAGATGATAGAGCTAAAACGATTTTTT
GTCGATATGTTGCGCTTCGAAGTAGCTGAACCTGAGTGATAATGTCTTCATCTATTGGACAAGTAGGGAAGAAGC
TAGCTCGCCGTATGCAAATACATAAAGTTCCATGTTTCACTTCTTCTAGGGGTGAATAGACGAGGACACACGATA
CAGTTTGTCATGTTAATCTTTCAAGCTCAAAAAATATAAAAATTGTATGAAAATCTGATACGGTAAATCTATATA
TTCTTTTGCATGTTTTTAAAGGAGCACTTATCTTTATTTGTTATAGAAATTTATTATTTAAAAGAAATTCGTCTT
TATAGAAATGTGCATGTGTTTTTTTTATTAGTAACACATTTTCATGCAACAGGAATCTTCGCTTATCTGTAGTGT
ACATCTCATGAGCCCATATTCATAGTTGTAAAGCAACACCTTCTCTGCAGCTTTTTCTTTCCTATTGTTTTTTGT
ATCCATAGTTCACATCTACACACTATATAAGGCTATTACAAACAATGATACAATATATGTTCTCATATAATTTGA
TCTTAATTTTCAAGATATTTAAGGTGGGAAAATATCGAGATAGTATACAATGGAAATCGTTACCACGTGCATGCC
AATCTTTAGTAGAAGAAGATTCCTAGATTCCAACAAGAACATGCGCATTTTTTCACGAAAGGCTGGAAAGTTTAA
TATATAATGGTCGAAAAAATAGGCATAATCTATTTAAGTACTAGCTTAAGTGTTTTACGCTAGATCTGGTGTTGA
CACTTGTACACCTGGTTTTAAAGTTGCAGAGAAAACTAGATTAATGCTCAAATTGTAGTAAGTAGATTGGATAAT
TTACACTCGGAAAAAACAAGTTTTTTCAGAAGAATTAGACTGTTGCTCACTTGAGAAAAATCTAGCTAGCTTTGT
TAATTGAGGATAGTTAGTTATAGTATTTGAATGACATTAAGGTGTTTGAATATCGCATGAATTGTCGCCTTGGTA
TTTGGGCAATTACCGGTCATTATTTTGATCTTTGTGATGTCAACTAATCGATCCCAACCATATATATCATAAACT
ACTGTCTCTTAATTGATCCATTGTGTTTTTAATTTTATCATTACTTTTTTTAACTAGTTGAGAGAATGATTATCT
AACCCCTTTCATATTCAGAAAACTTAGGTTTTGAGTTTTTGCTTTATTTGCTGCTCTCTTGAATTAATAGAGCTC
TCGTATGCGATTGACTTTGGGTGATTTTTTTTTGTTGGAAAAGCAAATTTCATTGACCAATATAACTAAACTAAC
ACACTACTTCCATGTGGTTAAGGGCCGGGATCATTTATTATTTGCATCTTTTATACGACAATGACAAGGATTCGT
TCTCATTACTCCATCCCATTTTGTGGTATGTAAAATCCTAACTTTTTTACTGCATTGATACAACATTTTATTTTA
GCATTAGATCAATACGATGGACATATGTCATCAAGTGAGGGGGTAGAAGTTTGCAACTAATGTTTTTGTGCTCAT
GAATCAATCTCTTCTAGGTAACATTATTTCACTCTTTTCTATAGCGAATACTGCAATGCTTTTACGTTTTAACTA
AACATGACTAAACCAAATACCAAAAAAAAAACGAGTAACACTTTGGTGGTTCCTATCTAAGTTGACCGGATCACT
CGATTTGATAAAAAAAATTATAGTAAAAGTTTTTGTTTTTGAATACAAATTATATATTTGACTAAAATTCGAAAC
TTAACCGAAACTAAAACCTTAGCAGATAATCTATAGTATAGTAGATTCATAAACCGAAAAAACAAAAATCTAAAC
CTAAACTGAGTAATTACTAATGGTGGATCCTTAAAACAAAGCCATAATTTGCAATTGCAACAAATGTTTTTGTTT
GGAGTAAAAACCAAAAAAAAAATGATGGGGAGCAACTAAAAATGTAAAATGGTCCCAATCTAATCGCATAAGTTG
GGAAGATAGTTAGTAGTTCTCCTACTCCCAACTACATCCTCTTCAATGCTCAATCTCGTCTTCTTCTTCCTCTCT
ATTTAATTTCCCTTGTCTCTCTATCTCTCTCAATTTCCTCATCTGGGTCTTCCTCGTTTGCTCCGCTTAAGCACC
SEQ ID NO: 67 pAtWSD1_At5g37300
ATCACAAATGATCAGTTCCAGTGTCATTAGACTTGAGCGTTAGGGAGTTTTTAAGAGGACAAAATCTATTCTGTC
TTCCCGAAAACCACTATGACCGTGAGGGGGAAACAACTTCGGGAAGATGGTTAAAGGGACATACCGTTCATCGGT
GGTCTAATCGATCTTTTTCTCGCAGGTTATTCTCGAGTTCTCGCACACATAAAAGTTTTTAATCGTATGAAAGTT
CCCGAAAATTTGACAAAAACTTAATTTTTTACAATTATAAAATTTCATTTAAAAAAAAACTTGTTTATAATTTGC
TTTCTTCCTATTAATCCTTTGATTCCTAGACTTATTTTGCTTTCTTGCTCCTAAATTAATTGAGTTGCTCTCTTG
GTTCGATTTAAATTGTTTGATCGACATCGATCTGGAGTGAATTTGGAGGAAGTGTAGACCCTAAAAGGTCGTATC
TCAAACTCGATGTTGGCATGTGATGCAAGAATTTGACTTACAAGTGGGTGTAGATCAAGGGTTGATGTTAATCTA
CTATCCGATGTAATTCGATACGTTCCATTGATGTGAGGAGGGGCCAATGTTCATGCTTAAGCCTCTAGTGTTATC
ACCGAACTCAAGACAATTGAATGCTGCAAGATTGTGTACTAAGAGTATGCAGACTGATTTTACGTGTCAAGACTT
TCCACTGCGATTTCAACCACAGTGTACGTATGTTTTCAGTGACAATAATACGGTATTATTAATACCCGACTCTTT
CACAAACTTTGGAAATTAGTTTGAGTTCAATTCAAAATCGCATTTAAAAAAATAATAAAAAAATTACATGAAACC
CACAATATTTGGTATGAAATTTAATATGGTAGTTAGTAACCTCGTAGGTACAACATTCATCTTCTTGCTGCCGAC
ATCATAATTGTTCATAAATATTTTTGAACACGTACATATAATGTTCATGGACCAAATCTGATCAGACTCCTAATT
AGATGAATTGTGTGGTCGATTTTGAGATGTACTTTTTGAATCATAATTCTTTCAACTACTCGAAATAAATTTCCC
TCACCATCCCAAGACTACTAGAATAGCATATTCTTAAATATAAATTATTATATAACCAAACTATTATTCTTTTTA
AGATTATCACTGGATGTTACGTTGAAGTTATAAGACATGATATATATCACTCAATTTCAGAAATGAGTAGAGTTC
TTAGTGCATAGTTTTTCTTAAACCTACAAGGCTACAATGAATAAAGCACGACACCATACTGTTCTCAAAATATTT
GTATATAGTGGAACTCGGTTGAAACATATATATACCAGTAAAGTTATTTTTGTTTTTGTTAATAAAAGAGTAACT
CGTGAACTTGAAATCAAGGAGCTAATAAAAAATTATTTTTGTTTGAATTTAACTTTTTCAAAACCTAACACGAAA
ATCAGAAATTCTGAGGGGTTAGAATGGTTCTCACTTGTTTACGTTTCTACGTCCAAAATACTCATTGAGTTTTCA
CATTCTCAAGTTTTGGAAAAATTAACAATTTCGTTTATACCACTAACATGTTTAAAACTATAATTATTCTAAAAC
TTTAATTATCAAGTTCATTTCGTTTAGCTAAAATTTATTCTGTTATATAGTTATTTATTGGATATAAACCCTAAA
TTTAGTGTTTTGATGCCACACGTAAGCTGATTTTCAAATCACAACTTTATAAATTCCCTCATTAATTTATCTTCT
AATGCATCTATCAACAATAACGTTATTTATATATGTTGTCTATATCTATTAATCTAAATTTGTTACAAACAATTT
AAGTCAGCACTTATCGGTTTTATGTCTACATCATACATTATGTAGGTTGTACGATGACGTGGGTTGTAGCTAGTT
AGGTATAAAAATTTACTTTTAAAAGAAAAACATAATCTCCTCATCAAAAGCTTTTAATTGAATTTAATAGCCAGG
GCCAAATATGCCAACAATATACACCAAAAAACATATTTGTCGCTAGAACAGTGCTAATTAAGGGACTCACATACT
ATTAGACATTAGTGCATGTCAGCCAATAGGCTTATTGTATTTTCAACATGTTGGCCCATGTCAGCCAATAGGCTT
ATAGTATTTGCTAAAAATAAAAATATATATATTTGCTCAAGTGTTGGTGTTGCATGGTTCAATATTTATCAAAAC
TCAAAAGAATTGTTGACTAACTTTACATATTAACAAGACTAATCATTTTTCTGGTTTGTCCTTAATTTTAAATAT
GTAAACCACTCATTTATGATTTCTCCAATTTAGAAAGAGTGAGATGTGAAGTTTCTCCCAAAGAAAGAAAAAAAC
TACAGGTAAATAAAGTGTATACTGCTTTCCAAAATATGTCGAATTATCACAAAAATAAAACGAATTTATAATTAA
ACATCTCGTTATGGATTTTGTATAGAAATTTATTGGCCTACAACTGTTAATAGACATATTATTTGGCATTGTACG
TAATCTAGATTAGCCAAACTATATATAGAACATCATGTTTAGCTGATTTTTCAAAAAAAAAAAAAAAAAAATCAT
GCGTAGACGAAATGCAAGTTTTAATTTAATTTTATTGCTTTCTCTGGTTAGCTCTAGAGGTCTTTAATCCACCGA
TCTTAAAAAAAAATCCAACTTTCTACTTTCTCTTTCTAAATGAAACAATTCCATATTTTTCATTTCATTTATACA
TCATACACTTAATTAATGATATTCTCTTTCTAGTAATTAGTACATTAATTTAAATTTATCAAGAAAATGCTGTTG
AACATATATAATCAATTATTATGAAATGAAATTTATAATGAAATGATTTGTTTGATAGAAAGAATAAATTATAAA
CTACTTAAGAGACCGACGAAGATAGCAACGACAAAACCCTAACCTTATACCAACCCTCATTTAATACCAATAAAA
AAAGAGGGACAAAAAAAATCAATGCTATATAATCGAAGTATCCACTACAAAGGTTGGAGAATCCTTAAACTGACT
SEQ ID NO: 68 pAtMAH1_CYP96A15_At1g57750
GTACAAAAAAAAGAACAAAATCTATCATCATTTAATTCGTTGCTTTATTTAAATAAAAAACACAAAAACTTGAAA
TCATATACTTTATATGATAAATTTAAAATCTATATTAGTAGTATAAATTTAAAATAATTTAAGGGACGGTATACC
ACGAGTGGGATCCTAAAATGATTGGATTTATTATGATAATAATTTATTTTTTTGAATTTTATAACACTAATAATT
TAGCTAACGAGATAATATATACGGATTTATATGGGATGACGGGTTTTGATACATATTGATAAAGAAAAGTTTATC
ACGGATGAAATCTTAAAATTAACAATCAAAATACAATTATACAACCTTAAACACAAAAAAAAATATTCAATATTA
ACAAAACAAATATAACTTAAAATTTAAAAACTTTAGCTATAAAAAATCGGTCCACAATATATTGCGGATAAAATA
TTCAAAATTTTAAATGTATAAAAATATATCTTTTGTATTAATACTTCAAAAAGTGAAGCCTAAACAATAGTAATT
ATATACTAAATAATAAAGAAATAGATATCTATTTAAAATACAAATTAATATGATATATTTTTAGTTAATCTTTAA
AAAAAAATATTACATTTAAAAAACAATATTACATTTTAAAGAAAAATATAGTCCCGCGGTATACCGCGGGTTAAT
TTCTAGTTTTAGATTATAACTGAAGTTGTTACTTACAAAACAAATACAGATTTAAAAAAAAAAAACTAATTATCC
AGACGAAACAAAGAGGATCATAATTATTAGTACAAAAATCTAAGATATAAACAGTAGTAGATAAATATTACCCAC
TCATAGTATAAACAGTAGAGGATAACTTTTGGCATTGATGGACGTAATAAAAACCAAAATGTTGTCATACTAACC
AATTAACTACTAACTAGAAACCAGACTAGCCAGGCTGTAGGGAAGAACAACATTGATTGATGTAGTGCTACATAT
CGATTAACTACTAACTAGAAACCAGACTAACCAGTCCATCATTAATATGTATAAATACATATTGTATATACATAT
TTTTAACAAATGATAAGATAATAGTAGTATTAGTTTTTTTTGGTGAGTAATAGACTAATAGTATTAGTTTTTACA
ACAGTTTAAATTGTTCAAACAAAATAAAACGATGTAGTCTATATAAATAAGCAAAACAAGGTTCCCGGCGGTATA
ATATACGCATGGTCGATCAATGAAAATTATGGATCTAATCAGTAAAACATTATTATTTCTTACGTAATTACAATA
GTAATTTATCTCAAAGGTAAAAAATTATTATAAATAAGTAAAATACAAAATCTAAATAGCAATGAAAAGAAGAAA
AAAAAAACATATTTCTCATAAAACAATTTACGTAGTTAAGAAGATTTTTTTTTTTCACAAAAAAGTAGTTAAGAA
GATTTTATCTTTCATTTAATTGTAGTGGAAAGATGTTTTTTCTCGCATAACATGTCATTTTTATGTGAGTGGCTA
ATTTATTAAATTGGTTAGATTTTAGTAGTTTAGATTTAGGGGTTAGTTTTGTTAAAAAATTATATGATAAATTAG
AGGGCCACAAAAAACATATTTTGAAATTTAATACGTCATGACTCTTAAAACAGTAAAATTTAATACGTCATGACT
CTTAAATTTAGCCGTTGGATGATGAATATGCACGACTTTTGTGATGTACATTATTAACAAGTTATGAACTAATTA
GCAATGACAATATACGTCATAATATACGGTATAAAATAATTCAGACATATTTTACCTAACAATATAGCGATGAAT
GATGTATGTGGTAACTTATTGACAAATTTAATATGTCGGTAAATATAATCAGTCACTAATATAACAACGGATATG
CGATGATAATAGGTTCTAGGTCTTTAGCAATGAGATAAGCGAGATATTTATGTAACATTAGTCTTTAAATTTTAT
ATATATGTCTTTTCTATTTTATTTTATTTTTTGAATGAAAATGTCTTCTTTATTCGTAATTTTAAACTCACTGGT
GGTGGATATATTGTTATGTCCCCAATTCGTCTGGCAACTCTCGTATATTAGTGAGAAAAATTTGTCCATTATTTA
CTGCACTATTACCCTGTGTTAATTTTTTGTATTGAAATTGTTTTTTAGTAATTCACGTCATATAGCGAATGATTC
TTTAATTTTAAAAATTCAGTCTTAAGTTTACAAATTAAATAACGCTACTGTAACCAACTCTGTACGACCAACATG
TTCGAGTTTTTGTATATACGGCCATATATGTACATATTTTACTATAAAGCGAAAAAATCCATAAATTATTTAATT
AATATATAAAGGTGCCATTCTATTTCCAATGTGCTTAGGAAAATGCAGAACCTCGTGCTATATCTCTGTCGCCAC
GTGCAAATATAACAATATGAAATAGAACTAGCAAATCTTGAAATCTAACTCTTAAGACTAATTCAAGCACATACG
TAGAGAAAGTTGACCAACGGTTATCAGCATTTTAACATGGACCTTATCAACATTTTAACAAAGTCCACAAACAAC
CAGTCTTACAATCGCATTGGTACAAGATAATCGAATTCATCTTCCATATAACAAAACCTAAACCTTGGTGTGAAA
AGGAGAAGATATGTATGTTAAAGGCCGCCTATGCCTCTGGTTTGGGGTATATGATTCTAAGATTAGGGTTTGAAT
ATTTTCGTTAGCCTGCCATGAGATATATTTATGTGATAATTAGAGCCTCTTATGCATTAATGCATAACCGACTAG
ATCATGTGGTATTCAGCTAATCAGTACACACAAGACAAAGTAGTAAATGAGTTTGATGAAGACTGTGGTCTGATA
ATTCCTATCAACGTTAAATCTGTCGGGGCCAGGCAGCCAGCAACATTTTGCCTAACAACGCTCTGAATTCAATTG
AACCTAGGCTATATAATAGCAGGCTAACTTAACTAAGAGTTTTGTATCTATACTCATAAATCCTTTTGTCTAAAA
SEQ ID NO: 69 pAtWBC11_ABCG11_DSO_COF1_At1g17840
GATGCGACGGATACAAATAAACGTATCATTTCACTTTTCTCGTCTTTGCGGTGGTTTAACTTTTGTTTGTGTGAT
AACTAATCTATCATATTGAATGATTTTAAGAACGAAAAGGTAAGTAAAAGCTATTTTTGAAAAATACAGTAGTAT
GTATTCGTTTCTTCTTCCTCAGTCTGTAAGTAAACACGGATTCAATAGTGAAAAGAAAAAAGAAAACACGGATTC
AATTATTGAGCACTAATTGGTTAAAGGCCCATTATGTTCCATTTTGTTTTTTGGGCTTTGACTCTTTTGTCACAC
ATGCGTTGACGTAGTAGAATTTTATAAACATTTTAGCCCAATATAACATTCTTTCAGCATCTTGATCCTTCCTGT
ATGATAAAATTAAAAATCGCCATGAATCTTTGGAAATCAACAAAGGGCCAGAACTTATAAGAATATTTGTTTTGA
TTATTAAGGTCTATAAATGTCTGTCAAACAAAAATGCATGTATTGTCTATATCATCAAAGTATGAATATCCAATA
CTGTTAAAATATTTATTTATCCGCATAAATACAAATACCTCTGAATATAGTTTTTATTTGGATTAAATACTAGAA
TTTAATTAAGAATTAATTGTCTAAATAACCCTAAAAAATAAAATAAAATTACAAACAGGCATTTACGTAACGTAA
TGACTTACAGAAACAAGCACTTTTATCTTTGCAAAATAACGGATTTACCTTCATTCATCCACAATATTACAATAA
TAGCTGAGACTTTTGACGACGACTATGGTGAACTCCGGCCATAGAAACTCAAATGACGGTGTGATAAACGAAAAA
TCGTGAAAGACATGACTCGAATCTGAAACAGTTGTGTAAGGATCTCTCTGTCACCGTTGGCATATAAATACCATT
GTTTCTCTCCTTTAGATTCCAAATTTCTGTTTTAATCACACTCTCTGTTGTTGCAGTTTAGATCTATTTCTGAAA
TCTCAATAGAAATCTTTCCCGATTCGTTTGTATGTGATCTGGTTTTTGTAAATAGCCATTATCGGGAGAAATTAT
GTTGAAATCAATTTCTCCTTTGTCACGTCGAGATCAACTTCTCTGATATTTTCCTTCATCATTTCCTATTACATC
TCACAACTCTAAGAATATCTTCTCTGCAATCTCAATGTCAATCACAATTCATCAATTCCAAACACAAATCTTTTT
CTTCTCCTAACTATCACAAAATTAGATGAGTGTTTATGATTAGAACCCTTGGGTTCCATATATACTATCTCATTA
GGGTTTAGATTTTGCTTGTATTCTCTTAATTTTGTTTGATTAAAATCGATTTCAAGGTTTCTGTAAATAAATAAA
TACAAATTGAAGAAGAAGAACGATGGAGAAGAAGCATGAACAATGAAACAGGGGCAAATCGTAAGTTGGCATATC
TGAAAGTTTCTTTTTTCAAATCCCATCTCAAAAATGGTTACCGAGAGGAAGCAAATGTTTTTGGTCGACGGAGTA
ACGTGGTGGTGGTGGTCGAGAAAGAAGAAAGAAGGAGATGATACAGATGACAGGGGTAAAACAGTCTTTTTCCCT
AGCACAAAGTACTCTTTTTCAAAATCCAACACAGAAAAACCTAAATTCAAAGATTTGGCAAAAAAAAGCCCTGTT
TTGACAATAAACCCTTTAATTAGTTGAAACAATTATAGAAATAAAAGGAATATTTGGCCACAAAATAAATAAATA
GTTTTAGCAAAGGTGTGTTTTCCCCTGTGCATTACTCAATCATAAATTTTACAAAAATTTATAGTCAATGAGATC
CATAAGAATACAGAGAAATTTTGAATTGGTTAGAAATATGTTTGTTTTTTTCGATAACTTAACTAACAAAATCGA
AAGTCTTATGAATTCAAAGATATTATTTAGTTTCCAATAATTATTTTACTTTTGATTTTTTTTTTGTTGAATTAA
TCATTAATGACAAATGGACCTACGAAGAATGCCATCAAGGGTCCTTATTAACAAGTACCAACAAATCAACAATAG
GCTCGTACTCCTTTCTAATTTTTCGGCACTTTTTTGTCAACAATATTTCAGCATTTATATACATGGTTTTATAAT
TAAAAGACAAATTATTATTTGTAACATATGTCTCCTACTACACCGAAAATTACCGGAAAAAAAAACATAATGTAC
ATATCTCAAAAGACAAAAAATTAAATAAAAACTTCAATTTCAAAGTAGTAACTTTCATTTTAACAAAAAAAAAAA
GTAGTAACTTTCATTCAAGCATATAATTTTTCTGTAAGATGCTTCATAACTAACTTTTAATCATTTTCATTACCA
TTAAGCAAAAGCTATAAAATCCCATAATTCATATACATAACAAAATAACAATCTTCCATCAAATAACTTTTATCT
ATGATATTAAAAAAAAAGAGAGGCCAGATTTGGGGGTGGTCTATTCATACTAAATGCAAACCATCTATCGACTAC
CAGACTGCATTAAATGTAACAAGTAACAACAACCAAAAAAAAAGATGAAAATTCACCACATCAACAGTATTGGAC
CCCACTTTCTTCTTAATTTTTCATTCAATTCTTCTCCCAACCATCTCTTTGCTGTCTTCATAACTATCTCATTTC
TTGTACGAATCAAGAATTTTTTTTCATTTTTGAAACCAAATAAATAAATAAAAATCTCATTATCTTGTTAGAGAT
AAAAAGAGAAACAACCAAAAAGAAAGAAGAAGAAGTGTTTGTTCTGTTTCAGTCATTCAAGTTCATGAGAATAGA
AACGAGTCCAAGTTTGTTGTTCATGCAAAATTCTCATGACTCTGTTACACTCCTGAATTTCTTCTACTTATATTC
CATTCAATAACTTTTCTTCTTCTATCAGTTCAACGTTCACACACTTTTTCCATTTCCTCGACAAACTCCTTTTTT
TCTCTCACTTTTCTCGAATTCTTTTTTTTTTTTTTTCTCTCAACGAAACATAAATCCTCTGTTTTGGTTTAAGAG
SEQ ID NO: 70 pAtKCS1_At1g01120
TATGCTTAAAAGTTAAATCTCTTTTGCAGTTCTACAAAAACATCTGGATTGGAGGATGTAGTCTGGAATACTGAT
GCAGCCGTTGAAGAACAAAAGCAAAAAAAAAAAAAAATAGCAAGTTGTTCAATTCAAAGTTTTTAACTAAAGTTG
AATGTATAATGAATAGCAAAAAATGCTGGAGTTGGCAAAATAGAACTATTCTTTACAAAAAGCCAAACCTAGAAG
TTGCTACAGATTTAGATCCATATGTTAGCCAATAGCCATATGCGATCATCCTCAAAACTCGGGTTGGCTTACTTT
GAGTTAGTCAGACCTATGAGTCAAAGTTCAAACAATTCAATTAGTCAAAAATACTCGGGAAGTTCGATATTTGAG
TATAGTTGAATACAAAGTTGTCACTTTATGGCTACGGTTGGCAAAGCGTTACAGTGACACAATATCGACAACAAT
TTGGAAACACACAATGATAGAATAATAGAGAGAAGCAAAAAAGTTATGTTAGCTATAAATCTACGAACCAAGTAT
ATTCTGAGTATAAAGTTTTGTTTTGTTATAAATGGGATTGGTTAATAATTTGCCAATCAAGTAGTGATTTTACTA
CAAAATACATAATGCTGGATATATAGCCAAGAATATGGATATAGATGGTCCATGTCTACGACAAAACTAGCAATG
AAATTGTGGCGGATAAAAAGACTTGATCATTTGTCGCTATTATGTTGCTATTTGTTAATCCATAGATTTATTCAA
AACAAATGACTACGATTTGGCAACAGAAACAATTGACAGAATTTATTTATCTGGTGATATGATGATATTGACATT
TTCAATATCGAATTCGTAGTTGGATTCGGATTAATCGTGACCAAATATTTATAATTCCATATATTAGCATTAATC
TTTCTTATTCGAGATTAAGAAAAAATTCGAGTAATTAAAAAAAAAAATTGTTTGAAAAACCATTAAAATCAATAA
TATTGTATTATATACAGTTATATACTGAAATTCAAATACAAGACCACGACAAAATGTTTACTCTAATGTTTCAAT
TTAATGAATCATTCGGTATTTTGAAGCATGTTAGAGCCTGGTAGTACTGTGCATGTTATACAGCCAATATCAACC
TTTTTCGCTAGTTTTATGTAAGGCTATATCGTTTATTTATGTAGCAACCATTTAAATTGTTAGTCCTTTTTAAAA
TTATTGCAAGATGTGAGTGTGTACATTCATACATTGATGACGGACTGGTTTCTAGTTAGTTGGTATTAAGCCGAC
CAACATTAATTGTTGGTTTATGTCTACACATGGGTACTAGTCTACCATTTATTATCATCATTATTTCATTTATCT
TGCAAATTAATACTTTGATCTGTTTATTGATTAATTCTCTCTATTGTTCATTATGCTGTACATAAACCTAAATAT
ATGAATTATTAGCATCTGATGAACTGGATCTTTCCAATATTGAAGTTTGAGAGTTGGTATGCGTACTGTTGAAAC
ATGTGTTTCATGCAGTAATCACGATATTATGGAAACGACGTCGCTGCCTTTTGTCTTTGTTTTCTTTTTCTCTAT
TATTTCCCAGTAATCACGATATTAGAAATGATTTAACTATTAAAAGCATTACATTTTACCAACAACTTTATCCCA
ATGAAAACAAAACAGGGACAATAAGTCCACTTTGGGACCTCAAATCCGAACATTTTATTTACCTACAAAGCTACA
AGCTACAACTACCCGTCCGAGGTCTATTTTGGACACCTTGGCACAATCAATATGAAATAACTAGAAAAATACTCG
AAAACTAACTAGATATGCAACTCCAAAACTAATTACTTCTTTATCAGATTTATAATATGAAATAAATTCATTATG
TAAAGGGTCCCTTATATAACAAACGTCTTAACGAAGACAGCAAATTTATAAATGACAATGACTACAATACTGGAA
CAGCTAATAGGGATGGTATATAATGGAGAAACAAATCGAAATGTGCTGCTATTAAGAAGTCATAGTAATTCATTA
TCATCAATTTACCATGGCCCATATTAAGGAGTTTGTATGCATGTGGGATACACATTTATACAAAGAAATAACAAA
TTTGAATATTTGGGACACGCTTTCGTCTACCCTTGTTCTTGCAATTTGGACAGTGAACGCTTCTCATGAATGAGA
GGTACGTTTCTCGAACACGTTCTCCCTTTAAATTTACTATTTACAACATATTATATCAACTTACCCGTCGCTGAC
CCAGTGCATTTGCACTACGTGCAGCCAACCTGCTTATAATATTCAATTGATATATAATTTTATAACTTGCCCTCA
CTCAATTTTGGATAACCTACATACACTTGCTAATAAAAACATCATGGATGTCTAAAACGTTTAAGTTTAATTATA
AGGAAATATATAACAAACATGTCATATTTTGTTGTGTTGTAGTGGTATAATTAACAAGTTATGTTGTTTATCAAA
AACTTCAAAAAAAAAAAAAATTAGGTTACACCAAAATAGAATGTTATGATGCCCAAATATATGTGTGAAAAAAAA
GATAAACCAAATTTATGATCTACCATATGACTTATGAGATTCAGCTAGGTTTTGTTAGACTTTTGTAACTTGCAT
TTCGTGTGAACAAAACATGAAAAATAATCTGACTACTTAATTTAATATCAAGGTCCCATATAAGTAGTTGAGCTA
ATAGTATTATCTCGGAACCACCCATCATTAAATTCGAATATTATTCCATCTTTTTTTTTTTTTTGTTAAGTCATT
ACTATTATTAATCTTTAAAATATTTTTATCTTTCTTGCACTCTATATATCTCTCCATCCCTACTTGCCCTCATTT
CACCAAAATCCTCCTAATTCACCAATTTTAGAATTCCCATTCTCATTTTCTCTCTCTTTCTATTTCTCCAAATTT
GCCTAAAGATTTTACATTTTATCTTCAATCCTTCCTTGATTTACGTTTGAAATATTTCGACCCAAAACTATACTG
SEQ ID NO: 71 pAtKCS2_DAISY_At1g04220
CGTTGCGTTTCATAAAAATTGTAAACAGCTTTCCAACAGACTTTTTTTTCTTAATAGGCTTTAAAGCCCAACGTC
ATAACTGTCTTTATTAAACATGATAAACGGTAGCATAAAATCTAGACGAAAAATCAACATTGTTAGACATGTAAA
TCATATGTTAATAGATTTTTGATTATTGGGTACAGAATTTGTGGTTGTTATAGCTACATGCATTTATATATGTAG
TACTATTCAACTTTTCTTGTTGTTACATGATTTCTATACGCTTGATTCGCATTAATCACACTTGTTCTATTCATT
TGTTCCTTGTTTAGCTATCACCATTCGATCTCGTATATGTACCCAACCCAAGTACTGAGTAACTATTTTTATAAA
TTTATCCAAGTACGAGTGAATCAAGTATTTATTTTTTTAGACCAACTTTTATTCTCTACATATACTTGAATCTTG
GGATACGTATAATATAAACCAACCCTCTTTAGATTTTAGGATTGTATTTTTGTGCATACACAGAAATCTGAGCAT
AGACAAATGGATAGAAACCACATTTGCTTTATTTCTATAGAGTTTGGACATTTTTTGGCTATGATTTTGTAAAAT
TGTTGTGTGCTCCGTGTTAGCGTTTGCCGAATGTGACACTAATTTTGATCGAACAAACAAAAAACTGAACATAAA
TTAATTAATTTGCACACATGTTTAACATCTATAAAAAAATTAAAAAAAATTGCACACATAAATATAGACAAATGT
TTGGAATAAGTAAAACATGAATCCAAGTGTTATTAAAATCAGTATTTTGTTACTACAATTGCACCAACAAAATTG
TATGTTCAAAAATTTAGCGCAGTACGAATCATTAATAACTTGTCCCTAACTACTAACTATATTCAGATGTATGCC
TAACTTGTAAATGTTACTCATGGTTGAGTAGTTGAATGTTGAAGAGCTTACGTTATAATTAAATGCTCGCTTTGA
TTGATGCAAACAATTTCTTCACTATAATAAGCGAAAATAATAGAAATAATAAAGATGGAAAACTAACAATTAATA
GTAGAACTATATATATATATATCCACATATAAATTCTTTTTTTTTTTGAGGGGTGGTTTAAAACTAGCTATTTAG
CTGGATGCTCGGCTATTCGGATTTGTGTAAAATACTTCTAAATATTGAGCAATAGGTAAATATAGTGAATATTTA
ACCATGACAAACAATAAAACACACACACATCAGAGGAAACTTGGGAATGAACGTGAACAATAAAAAAAAAATTAA
TAATGATAATAATAGTGGGCATAGAGATGGTTCTTCAACGAATTATTTCTTGCCCAAGTAGCACCGTTTGGTTAG
AAATTCTTCGACATTTATAGTTCAATTAAAAATTACTACTCCATAATTTTGGGTGACTTACCACACAATCTTTCC
ACAAATCTTCGACACGCAATTCACAACAGTATCATAGTTTATTATCACACTTTAGTAATTTATGCCAAACCTCAC
TACGCAAGCAAACTATGATTCATTAGATGTGTGGACAATTACGACGACAGCAAAAAAATAATATGTGTGGACACA
CAATGACAAACTCACATTGAACTATCTTGAAATAAATTTATACTAAATCGTAGCGAATATATAATCAGTAAATAG
AAGTTAAACTGAAGATCATAATCAACTAAAATGAATATCGTAATCAAATTGATGATAATAATGATTTCAGACACA
ATAATGGTGACGGTGTTGATGATGAAAAGGATCTGTGGCATAACAACTGATTGAATTCAATGCATCTTCATGGGT
TTTATTCCGTTAGCTTTATCTTTCACGTCTTTATATTCTTTAAACTTTGTTATGTTATTGACATTTAAATTCATT
TGTATGCATGTTATGAAGAGATCGTATAACTACAAAAATATAAAGGTAAATCTTTCATTTTAAAAAGAAAATGTT
TCTATACGTGTAAATAATTAGTAAATAACACATATTTCCTCCTGCGCGTAGCAGTTCAACAAACTCTCTTCTTCG
CGTAGCTAGAAGCTGCAATAACATAAAGAAATGATATATTTATAAATTATGTGAAAATGAAAAAAAATATTAGTC
CGCAATATCCACGTATCATTATGCGCCACGTAAACAAAGTGGACCCAGAATAACCCTTGTTTCCAGTAGAAGGAA
TCAATCAGTGGCAAGAAAGAAAATAATGAATTTCATTAAATCGCCACTCTCGAGCCATCAAAGTATCAAACAATT
GATTGGAGTTAGTTGTATCCTTCGCCTACAAATTTTTCCTTACTCTGTTTTATAAGTATATAATAGTTCCACTAA
AATCATTTTGGATACAACCTCAATAGATCTCAGCGTATTGTTTCCTGTATGTTCAATGAATCCATCCTCCATGCA
ATCTGGAGACTGGAGTATAAAATAACACGTATGGTATGGTATTTATTTCTCATAGCTAGTTCCTTAACAGTTGGA
AGAATTTATACATGACCCGGCCCTTTAAAACCTATCCCTACTACAAGACATTTGGGTTACTTTCCATCGACTTTT
GAATGTGCATCAGGCATGAAAATCCTTTAATTATGCATATTTTATAATCAATGCTTAAATTACTATAAACACAAA
AATTGTAGTGATATATTAGAAAGATAATTTAAATTGTTACATTGAAAAGATAATAAAAAATTATAAATAGACATC
TGATATAAAAATGGATGAAGTATAGCATATTAAAAAAACATATGTTTTTGGTCAAAACAGAATCAATGCATAGTT
AGCTCACCGCTACAACAATAACCATAGGGACTACGTACCATCCATAACTACATTTTCTTAAATTGCATCCTCTTT
CTAAAATTTTGCCTATAAATTCACAATAACACTTCAACTTTTTAGGCCATAAGTTATCTCTTTCTCTACAATAAG
CAATAAATCTCACCTCCCTTTTTTTTTTTTTTGTCTCGCTACTTTTGATTATCATTTAAAACCAAAAAACCTACC
SEQ ID NO: 72 pAtFATB_At1g08510
CACTATCCACATTAAGATTTCAATAAAATGTCTCAAAATTTATTAGTATGAATTTCTAATATGATATTTATTGTT
TTATAAATTTATTAATTAACCTAGAAAAATAATTAAAGAAGTTTTTCTTATTAATTGGAGAGTTACGTTTTTATT
CAATTTATATCTTTTAGGAACAAATAGATAGCGAAGGATTAAATTTTGCATAATAAATCATGAAATCTCAAGGTT
TAATTAAGTCAAGAGTATGGGAAATGCGAATTCAATCGCTTGGATGTAGTAAACAAGTGGTAACTAATATAGACC
ACAAACATTATTAGCTTTGACTATAAAATTGATCCTCAAGGTGAAAAGTAGGCTAACTCCTATAAATCTCCAAGG
CAACATCCTTAATTTTGAGAGTCATTCATAAGAAGAATTGTGTTCATAACTTTTTTTACTTGATCAGAAAATAAA
CTATGCAATAAGTAATAACTAGGTTTTCAAAAGGCATAATCATCTGTACTTCTTTGTATATGAAAAATAAATATG
CAAATGCAACTAAAGGTTTTGAATCATCTTTTTTGTTTAATTAAGACTTTTTAATGTAAACCAAATTAAACACGA
TATATATTCAAAATGAAAACAGAATTATCAACGCTGCTGTTTCTCCTGACTTAATTCTTGACTCGTCTCCAAGCA
AATTAAAGCGTCCAAATGAGAGATTTAATAATAATCAAAGATAAGTAATATCATCAATGACGAAATAGTCAACAT
AAAATAAAGTTTATTGTGATCTAGTCGATGTCTACTGTACTTTCTCAATGGTTATACTATTATTGGTCCCAGGCT
CCTCTTGTAGCGTATGCGAGGACTAATAGGCTGCTCTCATGGCTCATTTTAGAATTGTAAGTACGTTTCGCTTAA
GTCTCCTTCTCCATATGGCTCTTCGGAAGTACTAGTAGATCACATGCTCTACAAAGTTTTATACCGTCTCCTTCA
AGACGTATGCTAAGCATGCTTGTGCGAGTGTGCATCTCCCACACGTCTCTCGATCGTGGTAGTTATCTATGTCCC
TAGTATATGTGTTGTCAAACTTTTATTGATCTACGCTTGCCATCATCTCATGCATGCATGTGTCTCACATTTATT
ATGATCGTCAAATTTAACCACGAATATGGAGCAAACAAGAGACGGATATGGTCCTTGTAAAGATTGGCAATCATA
GTCAATTCCATGAACCTGGTCCTCAATAGCTTATCATATCTTCTTGTTAGCCTCTTATACGCTACCAAAATGATA
GCTGAAGGCAAAATTGATCTCTCCAAACTGGTAATTATATATTGTGATGTTCTTGTTGGGAAGTGTATCTACCTA
CTCTCCTAAACATTTGGATTGGCTATATTGTTTCGATTTGAAAAAAATAACACGTTGCTTTTGTATAATAACATT
ATTTGTATAGATTACTTGGTACGTAAAATTTTGAAGAAGTTAATTTAAATTATGTTTTCGGTGGAATAAATATAT
AAATCCGAAGGCTGACTTTACACGTTCGACAAAGTTTTATGGTTAAACTAAAAAAATGAGAAAAAGCTAGAGTTA
GGTTTAGTTTAAATGTAGTTTTCGTTAGTCTTAATAAATACAAGTAAGATAGAGATTGATGCACATGTACCTTGT
TGTCTCTGCCCACTTATTATTACACAGCGTCGGTGCCAGTATTGACAACAAGCTTGCTCACACATTCGGATATGT
GTCTTTTTCTCTCCAATTACAAATTTGATTGGTTCGATTTTTCAAAAAAAAATTTCCAAGTCCAAAGGAAATTTC
CACGGAAGCGCAAATCAAGTTTTGCGTGCTAAATGAAATTCAAAGAAAATTTGTAGTCCATATGAATAAAAATTG
AATAAATTTGCCTAATTAGGTTAACCAATCTTGTAACAAGAAAAGGGCAAAATGGGAAATATAGAAAATGAAATA
AAAATGTGTCGTTGTTGTTTTGAAACTATGGAGAAGAAGAGGAGAGGCAATTATATAAAAACCGACTCTCATATC
CACATATATCTCTCTCTCACCCACCTTATAGAATTTTCTCGCCCTATTTTTCTCTCAACACCAAAAATTTGTATT
TTTTTTTTACTATTGTTTACCCCAAAAAGTATTGAGAATCGCAAAAAAACTGAATTGTAAAAAATATTTGAGAAA
GAGAAATACAAAAAAAAACAAAAAAAAAGTTTTAAAGAAAAGGCGAAGGAGAGATCGTGAGAGACAGAGAGGCTG
CCGAAGAAAGGAGAATTTAGGGTTTGGAGACTTTTGTTGAAATTTGGCGTTACGTTTTTTTTGTATTTCCTCAAC
AAATTTCTCATCTGCTCTCTTCATATTGGTAAGATCTCTCTCTCTTTCATTTTTTTGTTTTTTTTGGGTTCTTCT
TCTCTTTGTGTAATTTCTGAATCTCTTCGTCGCTGGTTCGGATTCTTCATCTGATTGATGTTTGATTGAAGAATG
ATGTTTGAATTACATTTTTTCTAATACAAGTTTTTGTTTTTCTTTTGCGTTTCTACGATCTGGTTTTACCGGCTT
TAGCTTTTTCTCGCTTCTGTTCTTTGTTGTTTTGTATTTCAGATCTGGTGTTTTTTTTCTTACCTGCATCAAATT
GGTTTCTACCAAAACTTCGGAAACCTCTTTTGGCAAATGTTGAATCTTTGAATACAATGACGATTTACATAATAG
TCTCAGTGGCCGAACTGGATTATCTTACAATTTACGCAATAACAAAAAGTTTTTTTTTTTTTTTTTTTTTTGTGT
GTGTGTGTGGTGTGTTGAAGATTTTTAGTGTTTGTTTACTTCGTTTATGGAAGTCCTTTTCCTCTTCTGCCATTT
TTGTAGTTAACTACAAATTATACCTACTTTAGGAAGATCCTCCTGCTAGTAGCTAAAAGATGTAGCATTTATTTT
ATTATCACTCACTTGAGCTAACTTTTTTCGATCTTTATTTGGTGGCAGTGTCTTTGAACGCTTCATCTCCTCGTC
SEQ ID NO; 73 pAtLACS1_At2g47240
AGGTTGGAAAAATTTAATGATACATTGTACGTTTTCTAGGTTTTGTTCTAAATGCTCATAAACCTACTTGGATTT
GGAAATAAATGAGAGCTTACATATATAGAACAATACTCTATTTCCACAAAAATTATTTGCTACTCATATACAAAT
GTAGGTTTAGAAAAAATCCACTTTAGCAAAAAGAGATGGGAAATTAATGAAAATTCACTTGACTTTCTTTGTTTT
GTGAGCAATTTTCGATTTCAAAGTAATGGTCGGACTTAGACTTTTTCCTGTTCTTTTTTGCTGACTTAATAATAA
GCTGAAACTTAACAGTTAGAAGTTGGAACAAGATATAAATAAAAAAGCTAAGTTGTCAAACATAAAGTTGAAAAT
GATTTGGTGATGTCAATTAAATAAAAAGTTGAAAACTAATCATTTGTATTTGACCGGCGGTTACTTGGAATAAGA
CTAAGAATTATTGTACTTTCTATTTAATGGGTTTGCTAAGTTTTTTATCAGATCATTTTAAGCAAAATATCGATA
ACTTTTCGAAGAGATTAGTTGAAAATACTAAGCATTATATATATTTAAATATGATGGATCAGTATATATAGTTTT
GAAAATCACACTGCAGGATCCGTTGGAATTGGTGGCTGAGAACTTTTATGATCTTCTTAAAATTTTAATCCGTAA
ATAAATTATACGAGTTGGATTGGTTCGCGTCTTCTAATGCGTATTGACATCTATAATAAAAGCTATCAGAAAAGT
TGCTGATCTTTTTCTGTATCTTATTAAATATGTAGACCCGAGCAGAGAAATGTGGATCAATTAATAAATATCATG
TACGGATGAACAAGAGAGAAGAAAAAAGTATAATAATACTATAGAGCGAAAAGTATTGCATGATGGAGAAACTCT
CAACAATTTCAAACATGAACGACTTCTTACAAAACAATGTATCTTTAGTTGTCACAATCTTTGAAATTCTACAAA
TAGAGAAGACGGAAAAAGATGAAAATGAAATTAGTGTTTTTCTTTGGCAAGGTCCTTGGATCTCTTAAAAGTGAT
TAGATCAACGGTAATGTTTTAGATATCCTACATGTGCATTGATTCGATAAAAGCATTTAAATAGTGAATATTACA
AACAAAAATAGATACTTACATCATGAAATAGAAACAAAATCAAACTGGGTTGCTACTTACCAGTAATCACGTGAC
GGTAACTGGCTAACTGCAATAGTATATCCAAAACAACTTTAAGAAATGGATACGAAATGTTTTAGTTTTGGGAAA
ATGTCAAATAAAGATTTCGTCACAAATCCATCAATCCAGTATAGAACACTTTTATCAAAATGATTTTGCAAATTG
ATTCTTAGAGTACGATACAAGTTGCAAACTGGAAAAATAATTTTGCAGTTGCAACAAATAATAATAAATGATTGT
GCAAATTGATTCTCAAATTAAGTAGGAAACAAGTTGTAGTAGATATAGACTGTTTTTACATGATGTTAATTCCAA
AAGGATTCATTGCCATACAAATGGTTTTCTCATAGAGGACGTAATATCAATTAATGGAAAATAGTAGTTGAAGAT
TTATAGAAGAAAAAAAAAACTTTCCGCAAACAACACTATATATATATATATTGGATCAAAAATAAAAAGAGTTAA
ATGAAAGAAATACACAGACCTGGCCTGTATCAACCAACTCATATATTATTATATAAACCAACATCCATTTCTCAG
CTCCTCATCAAATTATCTTCTTTCTCTTTCTCTCTGATCATTTCCAAATTATTTCTAAGCTAAGAAAATCTTTAA
AAATAACAAAGCTTCTAAAATAATAATCCGACCTACCGGATTCAAACCATTGATCTGAAGATCATCTATAAACCA
GTCCTTGATCTATAAACTAAAATAAGGTCGGTTGCTTAATCTTTGTTACCCTTTTATTTTTGTGGTTATAATTAT
ATTATCTTCATTTTGTTTCCTTTTATGATTAATCGATCATATCAGGATAGATATTTCGTTAAGTTTATAGTTTAA
ATCCAGAATTTTATGTTTAGAAAAGAGAATGGGAAGAGTTGAAGTGTTTAACGTCTATGAATATTCCTCACGTCA
AGAAAAAAGAAAAAAAACTATGAATGGTCCTCTCTCGATGTCCTTACATTGGTTAGAGAGCGTTGCAACTACAAT
ACATACATCACTTTCATCATATTTATTGTCTTTTTCAGAGGTTTTCATATTTCGACTGAATTCTTCAATTTGCAA
TATTATGAATAATAGAGAAGATGATGAAAAAAGGATAAAGAGAGTGAAGCCAGGGTTATGCATGCTCTCACGTTT
AGGGCGTGACTCTAAACTAGCGATTTAGTTTACGGTATTATTAAAAATAATATTAGTCACATAATATTTGTAATT
TTAGTCGAAATTAATGACAGAAAAATACTAGACGCTAGGATTTGTACTTCCTTGAATCCTTGGAAAATATACGTA
TGTAATTAATATTATTCATTATCAAACCACAAATACGGAAACCAAGTTTGTGTCAAATCCAAATGGAGTAGTTTG
GTATCTTAGGTTGTTGTTTATCATAAATGAGAAACTTTGGGGTTGCACTCGATCGGTATGGTTAGGTGGACCGGA
CTGGTGACAATTAATGCCATTGATCTATAACTGTTAGATTATAATCTAAAGGTTCCATTGCAGAACAATTCATCA
AACTTTAATATCTATGTATTTATGTATGTTCCCAACTCACAGAATTTCACGGAATTGCAAAACTATGATAAATTC
TGCTACCTTAATGAATACACTATGAACTTGACTAAAAAAACAAGAATAAAGTATGATAAATTCCCTCATTTTATA
TTTCTCTTATCTATTTCACATTTTTGCTTGAAAATTTGTACCATTAATCTCTCTATTCGGCAGTGTTAAATTTTA
TTATTTAACTCCGTCGGTTGGATTCATTTTAAATTTCTCTTCAGGGAAGAAAAAAACAAGAGAGAGAAATAGAGA
SEQ ID NO: 74 pAtLACS2_At1g49430
CGATGGTTTCGATGAGCTTAATAGCTCCACGTCCTTTGGAACAGAGTTTGTCCATCACTTTCTCAGGACTGCAGC
AAACCACTTTGATTGTGACCGTGTTGGTTTCTTCTTCGAACTTTTGGTCTCTTACTTCTTTTGTTTTCCCAAAAA
AATCACATAAAACAAATTATTATTATGAGTTTTTAATTTCAAACCAAAAGAGACGTAAAAGGAGAGAAAGATATA
ACAATAACATACGAGGTATGCTCGAAAGAGCCTTCTTGACTTTCGAGAAATTCTTTTCGTTACTAAGAGGCTCCG
TCTTCAATTTCATCCATGTTACCTAGTTTAATTTCATCATATAATGTTCTCATAGCTTTTAATACAACTTTTGTA
ACAATTAGTAGTAACGGTTTCAAAGAGAAGCACAAAAAAGAAAAAGAAGAGAGCGTTTATTTACCTTCTCCTTAC
CCTTCTCGGCCATGGCTTTGAAAAGAAAAATATTTTCAGTGTAATTGCTTGTATATACTAACACTACTATGCAGC
TATGCTATATATTTGGAGTTTCACGAGAGGGTTTCCAAGGAAAAAGAAGTTGAATATTGTACAATTTACTTTTCT
CTTAGAATGTATAATTTCCATAGCTATTATTCCATATTACATTGTCCTAAAACAATGTAAATTTTCTTTTCTTTT
TTTGTTTAAAGTTTTTCCTATCTTGTTTTTTTAGTTGAAATTTCAAATTTCCTTTTGTTAACAAAAAGAAAATAT
TACCAAAAAACAAATGATGGGGCTTAGTGGGGGTTCTAAAGAGAGAAACAAAGCATAGTTCTATTCTTTTGGAAG
AGGACTAAACCCTGCTGTTTTTTTCGGAGCGAGGATTTACGAGTTTTGGCCAAGAACTTTCGGTTTTTTTTTTTT
TTTTGAATAGTCCTAGAACTTTCGGTTTTTTAAAAAATAATACTAATGTAATAGAAAAAAAATGGTGTTTCTTCG
GAGAAAAATGACAACGGGTGGCAAACCACCTTCGAAGCTATCCCTTGAGCATGTGCACGCCAGTGTACTTAAGTG
AGACATTAAGTTCCAAATCAATGCGAACGAGCTGAGAGGAGGAGATCCCATTACGACTGTGTCGACTCAAATTTC
TCTTCTTCCATAAGTAATAGATCACTGATTGGAACCACCTTGTGATACAAAACATTATAATCCCATTTGATGTAT
TTTACAGAGATTAGATGAGAAACCGTGTCTGACCAATGATAGTCGGCTAGAATGTGAATGTGTAAGAACACACAA
AACAAAATAAACCTTGGTGGAAAAATTATTATTCAAGCGTTAATCGTGAGAAGAAAATAATATTCTTTCTTAAAG
TATTGTGAAAACATAAACTTTTCAAAATCTAAAATATGTTAAATATTTATTTGAATTTACTTTGTAGTTTAACCG
TGTAAAAACTTTTTACCTATAAAAAAGAAAAAAAAATAATAGGGATAAGTTTTTTTTATATATACCCATAATAAT
TAAAACATCGTTCAAATTTGGATATTTTCCTTATAAAAAGTTAAAGAAAAAGCATGTTTTTGTAAATTTAATTCA
TAGAAAATGTCTGAAATTTTCCATTATTTATAAAGATTATAGATTCGCCGAAAATTAAATTGTTAAGGCTGGGGA
AGAATTATTGTTCACGCCAACAATCACGTTATGACATAAGATTCGAAAGTTAGCGTTAAATTTGATGTTTCCACT
GTTACCAAGCAAAAAAATAAACATGTCAAACAAAAGAAAATGGACTACAAATTTGATAGAAAAAAATGTGAATAA
AATAACTGTAGTCGTTTATTTACTTAGAGTTGTATACATATTGACTAAACACAATAAGAAAACAATTTTATAGAA
TACTATAGGTCTTAAAAGATAGTATATTTTATTTTCATTTGATGAAATTACATATTTGACTATGTTTCTAATTGA
AAAAAAAAAAATTTATTAAAATATCCATAAAAATGAAATGATAAAATTTATTAAAATTAAATGGGCTGACCTTGT
AATAATATAGGGAGCAGGTCGGAGACTCAGAGAGTGAGCTTTTCTTGCTCGTCCATTTATTAATAATTTCATTAA
AGAGAAAATCTGTAGAGTTGACACTTTTTAAAGTCTAATTATTAGGGATATATACGTAATTTGGTTTGAAAATAA
ATATCAAAATCTAGCTAACTTGATATCAGTATGGGTAAAAGATAGGAGTACCTTTTGTTGTTGATTTAATTGACG
ATCTAGTGTTAACCCAGAGAATTCTAATTAGATTAGCCTCTTTCTCTCATCCGAAAGTTGAAGTTTAATAAGTTA
ATCTGATATTTGTAAATAACTTGAACAGTAAATCATAAACAAAGAAAAACTGATTTGGTTGCACAATTTAATTAG
TGAGGTGAGGTCTATCACAATCACTGGTTACTATAGTGATAAAGATCCTGATTATGACAGTGACTGTGAGCTGGT
GAGGTCTAAGAGTACAAAAACAAATGATCTAAGTTATCAAACTATAAACTATATAATTCGAAATATATTAATTTT
GTTAAATCCAAAACCAAATTGCATGCAAATGGTCAGTTTGTAAATAGTCTACGTTTGGTCCAATTACTCTTTACT
CTTAAGGTTCTTTACTATATTCAAACCCACTAAATCTACTTGCATATAACACATAGAGACACAAAAATTAGTATT
TAAAACATTTAGATAACAAACAAAAGAAAGAGAGGCTCCTAATAAAGGCGCAATTAAAAACCGGTCAGAAATACA
CCAATTGTGAGACTCAAGAAGTTATTGCTCAACTACTTCCTCTAACTCATAACCACAATCTCCAAACTTCACCAC
CGATTCACAGAGACTTTTATTAACCTTCAAAACATTATTTATTATTCCAATCTTCAAAGAGAGACACTCACACTC
CTTATCTTCTTCATTCCTCCATCCTATTTTTCTTCTTCGCCAAAGTGTTATTCCTCAACTTTATATATTACACAA
SEQ ID NO: 75 pAtCYP86A4_At1g01600
ACGATATGCTTTCTTCATCTTCTTCTGATCAAATCAATCGCCTCGCTGTTTCCGTCGAGGGACCCTACGGCCCTA
GTTCCACTGATTTCCTACGGTAATTCACTTAAATCACAAACAGAGAAGTTCAACATTCTGTTTCTTCCGACACAA
GTAACATTGATGCTCTGTTTTTCTTCCAACACAAGTAAAATGCTCTGTTTTTCTTTAAGTGCAGACATGAATCTC
TGGTGATGGTGAGTGGAGGCAGTGGAATTACACCGTTTATCTCCATAGTCCGCGACCTATTCTACATGAGTTCAA
CGCACAAATGTAAAATCCCCAAGATGACCCTGATCTGCGCGTTCAAAAACTCTTCCGACCTATCCATGCTCGACC
TAATTCTACCCACCTCTGGTCTCACCACCGACATGGCCTCGTTTGTAGATATCCAGATCAAAGCCTTCGTCACCC
GAGAAGAGAAAACATCAGTAAAAGAATCAACTCACAATAGGAATATCATCAAAACCCGACATTTCAAACCAAACG
TCTCAGACCAGCCCATCTCACCAATCCTCGGGCCCAACTCTTGGCTCTGTCTTGCAGCCATCCTCTCTTCTTCCT
TCATGATCTTTATTGTCATCATCGCAATCATCACGAGATATCACATTCACCCAATCGATCAAAACTCGGAAAAGT
ACACTTGGGCTTATAAATCGCTCATTTACCTTGTATCAATCTCCATTACCGTGGTGACTACTTCTACGGCTGCTA
TGTTGTGGAACAAAAAAAAGTACTATGCGAAAAATGACCAATATGTCGACAACTTATCTCCGGTGATTATCGAGA
GCTCGCCGCAGCAATTGATATCGCAATCTACCGACATTCATTACGGAGAGAGGCCTAACCTTAACAGTAAGTCTA
TTTATAACATTTTCATAGAGTAAAATGCTGAGTTCTAACTCTGTTTATTCTATTGTGTGAAACAGAGCTTCTAGT
TGGTTTAAAGGGTTCGAGCGTGGGAATTCTTGTGTGTGGTCCGAAGAAGATGAGACAAAAGGTAGCGAAGATCTG
TTCTTTTGGTTCTGCTGAGAATCTTCACTTTGAATCTATTAGTTTTAGCTGGTGAATTTTAAATTCAGACTGATG
TTTTATCATAGATGTTTGGGTTACAAAAGAACTAGGTGGCTTCGAGAGTTCATAACTCTAAACATGTCCTAGTAC
TAATTTATCCGTCTCCGGTCTCCTAGTAGACTAGTACTAATATTAAAATGTGAAGCGATATATGAGTCACATGTT
GGCAGGATTTAAAGTTTGACAGATCTATATGCGGTGGATACGAGTTCGGTTAGCTGAAATTTGTAGAACAAGCAT
TTATGTCATGAACGTTTCTGAATGGTTTTATAATGGTAATTAGTGAATGGTTTAAGACATTCTTTAGGCAGTCAT
GTAGTTTTGTAATATCAAGGAAAATTGGCTTGGCTCTGAATATGATTTTTTTTTCTGAATTGGCTTGTTCGAATC
CTCAAGATGATTTTTTGAAATGTAAAGTTGCATTTTCTGATATAATTTTTTTTTGTTGCCTTTTATAAATAATCA
TCTTTTCTTTAACATTTGGTTGCCTTTTATTAAAAATCATCTTTTCTGATTTTTTTTGGTCAACTAATGTAACAC
CTTTTCTTTAACATTTTTTTTAAAAAAATAAAACGCAAATGAAGTCATGGTAACCCTTTTGACTTTCACAATACC
ATTCAGTGACATCTTTCTTACTTAATATTCCGCTGTCATGTCCCACTTTGGTTAACATTTGAGGAATTTCATCAG
TAAAAATCGAAAAGATATAAAGGCATCAAAGGAGAAACCTTAAAAAGTCAAAATAGAGACACAAGAAGTGTTTCT
TTGTAGGCTTAGATGAGAAGAAGAAACTAAGGAAACTGTATTCCTAAAGTAAATACTACTTCCTTCATTCCTATG
ATAATCAATTATTAAAAGATATGGAGTCGCTTACCAAATCATAAAACCGGTAACCCAAATCTAGGAAATTTTATT
GTGGAATAAATAACAAAGCCTTTATTTTATTTAAATAGAACAAGATAAAACACCAAAAATAATAGCTATGTTCTG
AAGTCTTGACCAAACTACTGATACGGGATCTCACCTAGATTACTTACAATGTAGGTGTAAACCGAGTTTTTAACC
AAACTAAAACGAATTAAGCGACAATTAGTTACGGAAGCTTAAACTCTACATAGATTGATAGATTAAAAAACCCTT
GAACAAAAAAAGAATCCAAATTCAGCTTGAAGTAGATTCAACCAAACCGAAATAATTTTTTAAAAATATGAATTT
TGTTTCAGTTTGAATTTCATTTGATTTTCCAAAAATTCACAAACCAAACCAAAAACTGAATATCACTTGTAGCTG
TACCTATAAATTATTAGAGCATTAAATCTATCTCACCACCGCCAAACTCAACGTGTGTTAATCTTTTAACCCTAA
ACTTCTAAATTAAAAAATAGACGACTTTTTTACTTATTTCTTCTTCTTCCCCACCATCTTTTTTTGTGCTCTATG
TTCTCAACTAATCTCATTTAATTCACCACATACAGCTGCATCAAACATATATATATATGCATGTATTTATGTACT
TATACACATACATACATATGATCATTTAATGAAATTCATTAAATGAAACTATTCCTTTCGCTGCAAAATTAGGTA
CCAGTAAAGCATAAACACCACTTTACCACTTCTTGAATTCCAAATCTGAAAGCTCTGTCATTATATATGTATAAA
CCAATTTAAACATATACATGTCTCACCGATAACAACGGAGGTTCATTAATGAGGGTTTGATTATGATACTTACGA
GTGACAGATTGTGAATATCAAAGAGAAGCTTCTTCCTCCCTTTTTTCTCCCTATAAATTTCCGTAGAAAAATCAT
TCATTCGCATCTCTTCTCTTCTCAAAAATCACCACATTTCTTTACTTCTCTGGGAAACAATAATAAAAGAGCTAC
SEQ ID NO: 76 pAtCYP86A7_At1g63710
CTTCCTTTTATAGCTCCACCTTCATCTCCAGCTTCATTTTTCCAATCAGAGCCACCTTCTGCTACACAATCACCT
GTTGGAATCCTCTCTTTTAGTCCTTTGCCTTGTAACAACCGTCCTTCCATCTTCGCCATTGGACCTTACGCTCAT
GAAACTCAATTGGTATCTCCTCCGGTTTTCTCAACTTACACTACTGAACCATCTTCAGCTCCAATCACACCTCCT
CTTGATGACTCATCTATCTACTTAACCACCACAACACCTTCTTCACCTGAAGTGCCTTTTGCTCAGCTCTTTAAC
TCGAACCATCAAACCGGTAGCTATGGTTATAAGTTCCCAATGTCTTCTAGTTATGAGTTTCAGTTTTACCAACTT
CCTCCTGGTAGTCCACTTGGTCAGCTTATTTCCCCGAGCCCTGGTTCTGGTCCAACTTCTCCTTTTCCCGATGGA
GAAACCTCGCTGTTCCCTCACTTTCAAGTCTCTGATCCTCCAAAACTGTTGAGTCCAAAGACTGCTGGTGTTACA
ACTCCTTGTAAAGAGCAGAAGATTGTAAGACCGCATAAACCGGTTTCATTCGATCTTGATGCTGATCATGTCATT
AGATGCGTGGATCAGAAGCTAAGAACAACGTTCCCTGAAGCATCATCAGATCAAGAATCAATGAATCATTCGTCT
CTCGGGTCCAATAAGGAATTCAATTTCGGCACGGATGAGAAACATTTGACCGTTGATGAACATAGATCAGCTTCG
CCGAAGAACAGCAATGATTGGTCTTTTTTCCCTGTGATGCAGTCAGGTACACTAAGCTAACCTTCATCAGAAGAA
TAGAAATCTGAAATTTAGATATCGATTCGGACAAATATCTTGTTCAAGATTCAAGAACAATTATAGAATTTTTAG
ATGATTCTGTTCAGGATCTTAAGGATATTTTCTTGTCTCTCTTTTTGGTTTTGTAATAAATATTTGGCATCGTTA
GTTGTTGTATATGGCTACTCTTTATGTAGTTTTTTGTTTTTGTGAATACACATTTGATCGCATTTGTAAATAAAA
TTTAATCAGTTTCTTCGGAGAAATTCCATTAAATTTATAGGTATTGTTTACTATTTGATCTTCTGTTCTGTGTAT
TGTTGTGACTAGAGTTTTGTTATTGTTAGAGCCAATAAAAGGTGAGATCTATAGCATAAAGGTAGTGAATGTTTC
TCCTTATTTGTTATCTTAGATTCAACCATGATATGCAATGTAAAGGAGAAAAAGAAAAAAGAGAGTAAACATTTG
AGTATACAATTAACAAGCAACTCAAGACTGTTAACAAGTTTTATTCACCAAATCGATATACCGGTCAGGTTTTAT
AAGAAACATCACATCACAACCACTAAGTCCACTACAATTTGAAGCTTTGAGCCCTGTAAACAAGGATTATACATG
ACAAGTTAGAATGGGCCAGCTTAAATTACTAAGTCCACTCTCAGCATTCCGCAAGCCCACTTGGAATCCAGCTTC
AAGTTCTCATAGGCGCTTTTGGTTCAATTAATCCCACCTAAAACCAGTATGCAATTGGAGAGTTAATAAATCTTG
TAGGTTTAACTCTTGTTAGGAGGATAAATTAGATGATTTAAATTTCCTTATGTCTTTTTAAAAAAAAAAAATACA
ATTGAGTCTTGTCAATATGTATCTCTTTTTTTTTTTTTTTTTTTTTTACAGCAACGTTAACTACTAGTCAGCAAA
AAACACATAGGTTAAAATATGTCGAGTCTCATAATGTGAAAACAAAAGAAAATACAAAGATTGAAAAAGAAACAA
CGACCCCCACTTTTAAACCCAATTAATGCCGTATTTTAAGTTGAAGTGCCGCTTTCCTCAAATCTCACTATTGTT
TCTCTTATTCTCTATCATTCATATTTCATAGCCAACAAAGATTATGGTTTAGAGCATTTACTGATTTTATGTCAA
TTATAAACATGTCTTTTTTATCAAACGTTGTGAATAATCGATTACTTATTATATGGTGCTATTTATAAACTTACT
GCATTTCTTTTTCTTCAAATATTCCGTTATAAAGGTGTTGAGAATTTTGTTTATAAAATTTTAGAATTACTGATT
ACTGTACATACATGTGTTTGTGGTATTTTGTTAATTATTGTCAATTATCAAAACACGAAATGTTGTCTTATTAAC
CCTTTTTCTGAATTATTGTGTTCTTGTGGAGGATATATTATATAGGTCGACATAATTTATTCGGATCACGCGTGG
AAATTATATTTTGCCAAAACGAAAGTAGGAATTATATGATTCATGTATCATGTTATTGCTATTTTTATTTGATAC
TGTATTTTTTATAAATAAAGTTTTTTGGCTCACCAACTTAAGTGGCACTAATGGCATTGGCCCCTTTAAGCTGTA
AGTTACCATTAATTTATGTTGCCAAAATATATAGCTGTCATTATGTTGCCTTAGTATGAATATATTTTTCTATCA
CACAATATCAATAGATATATGGTTATGACCATATCAACTTGTCCCATCAACATCTCAATCAAAACATTTGACATT
ATATAATTAACCAATTGATTTTAGGATAGGACTCTACAAACTTTTATTTAAACAATTTTCGCCTGAATAAAATCA
TGTGTTTAATTAGGAAGGTGATTATGCACAAACTCATAAGTGAGGAAATAAAAGGTTGAGATATAGTAGGTGAAT
TAATATATACAATATTAGGTTATTATAAACACAATGACAACCACAAAACTCTACACAAACAAACACATGACATGC
AAATGCAACTATACGTCCCCAATTTTTTGGTTGGGAAGAATAATCAACAACAAACTTAGTTGCCTTATTAATTGC
TTATACTTTTCTTTTCTCTTTTTAGATTTCATTTTCACATTTTTTAATCTATAAAACATTAATATGATTATCTTC
CATTTCACACACACACTCACACTTCAATTCTCTTCTTATAGATTCTGCTCTCACCTCCAGACTAAAATATAAAAA
SEQ ID NO: 77 pAtLCR_CYP86A5_At2g45970
CCATTTCACAAAGATGGTAAAAACCGTAAAATGCTGATGAAATCGCAAAATCATTTTTTTTACTACCAAAGAGAA
CCATTGTTACACCGATACAAGCTTTAGCTTTAGCATGTGTCGCAGTAGTCGAGACAAAATATAAATCCGTCGTTC
TTTAGTTTCGGTGGTAAACGAGAGAATAAATGACTAATGATATAGATAATTAAGTAAACATGTGATTATGCGTAT
TGAATTATTAGCCTCTAGAGTGGTTGAGTGTTGTCTGAATTACTATTAATTACCATGTGAATAAGCGACGTGGTA
ACTAACTATCATAATGATTCATTCATTATTTTAGCTACTTTTCAATATGATTTTTTTTATATCTCCTTTTGATTC
TATATATGGTGGTCTTAAATGCCAAATGAGACAAGTAACAAGTAAAGTGACCAAAACAATTTCACTTAAATGACC
AGTTTTACGTGGGACAACCCACGGAATCTAAAGATTTCTATGTTGTTTATTACTTAACGTGATAGGTTAAGTTTG
TTTGTTAAGTCGTAAGAATCGTAACCATGGACTCATTACCATTAATGTGCCAAATTCCGAATAGATTTTGTAGTC
ATATAAAGTCATTGCGTTTATTCAATAAACAAGTCATAGCTATCGAGAATTCCTTCATTTTATTTTATTTTTTTG
GTAAATAGTGCATGGGATGGATATACTTGATGCACCTAATCTAACTATTTTATTGTCTATTATTTATGTAACTTC
CCGTACGTAACTGTCAATTTCAAGTATAAATATTAATTAATTTGTAAAGATATTATTATTTAAAATGATCTACAA
AGTGTATTGTATATGTTTTTATTTTGCCGTTGATGGGAAGGTAACCTAATTAGATAACTTTATATTCTCTATCGA
TTTGTGTCCTTTGTCTTAAGTTTTAACCTAATATTGCATATTTAACCACATAAATACACTAACATGTGTAAACAT
TCACATTCTGCAAGGATTTTTTTGTTTTTAAAAGAACTTGAAACAAAATAAAAGAAAAGGATCAACTGAAAACCA
ACTGTCAATCAAGTTCATTTAAAACTCACCTTGTTTCATACAGCTGTAATGAAAAATAATAGTAATGGATTTCGA
AGTATTTTAAAGTTCCAACCGGGTATTCTGCAATGCTTGGTTTGAAATTTGAAAAAGTTGACTATGGTTGGTCAA
TGCATTCATGCTTTGATGACAAAAATCAAAATTATATATATAAAAAATAGTTTTCTTCCTTCACAATTATCCACT
ATAGGGTTTATATATACTATATACTCTTTAATTAATTCTCCGATAGTTGTTCCTTTTGAAAAGGGTTGAATTTTC
TGATAGTTTCGTTAACTTAATCGTTTTTCTTCTATGCATTAATTTTTCGAAAATTGAACTCCAATGCAGTACATG
ACTACATCGTATTTTAATATTTTCCCACAGCTTCTAATAATATTACAACGGGGGGTTTAAATTCAAAATTTAAAA
GATTTTAATCGTCGACATGTGAAAATGTAGTATTAGGAGTGTGTTTATATATCCCATGTACACATCACGAGTTCT
CGTATGAGTATGTGTTGGTTCTTACATTAATCAATTTATCACGATCACGCATTAAGAAGGCGACACATTATTATA
TTGTAGACATTGAATACTTGTAACGTCCTTTTTAAAAATATATTGACAAATATGTCACCAAACCCAAAAGCAACC
TACATATGTTGTGTAGTTGAGCAAAACTATCATTGGTGAGTTTGTTCACCTATACCCTAACAATCTCAAATCTAA
AACCCTAATTACTCATCCCTATACTCTATTGTATCACAAAAATAGGATTCTATAATTTTATACACGCACATATAC
TTTGTCAAAGCGTATCATAAAAAAATGAAATAAAAATCAACGAAATAACGTGATATGGCTAGTAATATAGTACGT
AGTCTTACGACAATAGTTTAACTTATACGTGAAAAAGTGGGATAACATGAGTTTTCATATTTTTGTCATCAAATG
ATATGAAATAGAATAACCGAACATAGATCATTTTTTCACTAATTGAGAAGAAGAGAATTAGAGACTATCGACTCG
TACGAGTGGTGAAACCCCTGTCATTTTGCCGTTATACAATCTACTGACCATGTCCATGACTAATAATACATCTAT
CAACAACCATCATGTCCCTTGAACCGACACCGAATTACAAAACCCTAACTTAATATCTTCAAAACATGCAATTAA
TAGACACGAGAATAAGATAAAATGAGGAGGCAACATCCCATGCTTACTTTGTGACTTCTTTTACACGATTTTCTA
ATACATTTTAAAAATACTACTTGACATCTCTCCATTTTTGGGGGGTTTTGAATTAAATTGTATATATAAATGGTT
CATGCTTGGACATTGAAAACCTGTGGGTCATTTAGTCATAGATCTCTCTCTATCTTCCTTCCTCCTCCTCTTACT
AGGCTCCTCAACTAAACGTCTTCAATGCTCTCTCTCTCTCTCTCTCCATTCTTTTACGACCTCATAGACTTGAAA
ATTTACCATTCTATTTTTCAAAACCTTTATATTGATGAGATTAATATATAAAGTCTCCAACCACCTAGCTACCAG
CCTAGAGCAGGAACATTAATGGTGGTGCACACCATCTCATGCTTCACATACCCTAAAGTTCTTCACTCCAAGTTT
ATGAGGAGATCTAGAGAGATAATCATATAGAGAAAGAGAGATCTCCAGAGAAAATCCATTGAAGGGAAAAAAACA
GTCTGTCTTTCATAATTGCTCTTTCTATAAATCTTCTCTCTTGTGTTCTTACCTTTCTTCTAAAACCATTCTCTC
TCTCTTTAACACTTCATCACTCTTTACGGAAAATTTCTTATTTTCACCACCTGAGCCATCTCTATTTTCGTCAAA
ACTTCTCAACTTTTGTGCCAAAACGTCATTTCTTCTGAGGGAATAAACACAAAAGAACAATTTTCCCGGAAAATC
SEQ ID NO: 78 pAtKCS10_FDH_At2g26250
GTCGTGTTTCGTTTGTGGATTTTGTTTTCTCATGATTTTTAAAATCCCATGTTTACACGATCATAACGTTTCGTC
AATTTTAAAACGATAACTCTATAAGTAATAGCGTGTACCTTCATCGTATTTCTTTCGACGTCGTAATTATGATCA
CCATTCACCATTTTCCTTCTTTTTTCTTTTTAGGGTATATAACGCAACTATATAAAGCACACGTACTTAAAGAAA
CCCATTTGGGCATGTGTTGTCCTTGCTGTGGATCACATGCATAAGTCTGCTTTTTCTTTTTAATATGAATTGTTT
TTGACTTCATATATAGGACCAATTCAAACATTTATATTTAAAGAATATTTTACTCAGTATTATTACTTTCTTTTG
TAATGATTTACAATTTTGTGCCACTCGTATGTATAGCGTTTTAAAGAGGTTACTTACCAGTAGTTTTTGTCCAAA
TTTTATATGTGAAATAACCCTTCTCGGAAGGCTACCACATTTCCATTAAATTATTGGAAAACTTTTACAAAATGT
GACAATTCGATCGGAAGGCTACTATCTCATAGGTATTGAGGCAGGATAGTCACTAAGTTAATGATTCTGCATCGG
TCACAAACGTGGTGATCGACGTGAAAAGATTGAGCCCTCGCAAAAGTGAGATGGTGCTTTGTCAAACTTTTGCGA
TAAGTGATCATGATAATTACAAATTAAACTTCATTTTTGCCGTTTATGTGTCACTTAAAATTATGTTTTATTTTA
GTTTTCTTAAATGAAAAAAGAGAGTTTATATATATATATATATATATATGAATCAAAATGTTAGTTAGTGGATCT
TTTGATTCTGAAAAATTGTTGGATATTTGTTTCCTCGCTTAAATTGGTATTTATAGTAGAGTTTGAATCGAGGAT
TTGAATAGGTTCAAGAATTATTTTACCCTTTGGAAGCGTCATCTCGCTTTGAGTTCTACTACGATGTTATGGTTA
GACTCCCACGGTGGGAGTTCCCATTTACTCTTAAATGCAACTGAACGGGCTTTACTATTTGATGCAATGATACAA
AGAACCTTCAGATTTAAACAATGAGACGATCGCAACACAAGAGAATAATGTTACTGATCCTTCTACAACAAACAC
TGCACCAAGGCCTAGTTTGCTTGATTGAATGAAGTATACAAAGCATAGACACTTATCACATTTAAAGTATTTGTA
ATATGGCAATTTCGTATGTGTTAACACATTTCTCAAATTTTAAAAATCGTTTATATGGATCTTATAAAATATGGT
AGTAATAATTTAGGTGGGGGATTGGGTCATTATTTATTTCTCTTCTATTTTGCTACTGCATTAACTAATATTAGG
CTAAAAGTTCCTTAAATAATAAAGCTTTTTTATGCGTAATGTAGCCGCCCTCATTTATATAGGTCTCACCACCAA
TCGATTAATTGTAAGTAACAGAAATTGTTGATTATAGTTAAATGAGTCGTTGATAATTTGTTTAAATTTGTAAAC
TCTTCAGGCAAAATTTATATTATGTGAACAAAATTGCCATATATTTCATATCATGAATGAATTTGGTCTAAACAT
ACTCCATACTGTCAAGGTTTAAAAAACATTATATTCATACAATCATACCATGAATGAATTTGTGTAAAGCTGTAA
ACTCTTCTTGCATCCTAGCTATTTTCCTCTTCTTCTTTTTTCTTTTTCTGACTAGTCATATAGATTTTTTTTTTG
ATTTTTATTTGATCGTTGGAGAATCTTCAAAAGATGACTCCACTCATCTTTTCAAAAACTACCTAGACCATATAC
AGGGCTCTCCGTCTACAACAATTAGCGTCCGGAAAACGTAAAGAAGTCTACAACAATTAGCGTCCTCGTGGATCA
GTATCGTGACATTTGTGTCATGGAACCTATCCTTGGCAGTCGAAGTTAGGCTCACTCCCAACGGTCTAACTTCTA
AGTGCTCACTAAAATATGAAAAACTAATGTTCTCGAACAAACACCACCTATAATGACTCAACCCTCCATAAAATT
CGAAAACTGATCTTAAACAAAAATATATATAAGTGACGTAAAACATAAATTTATGTATATCTATTAAATAATAAA
TTAGTGAAGTAAAACATAAACTTAATCGCATAAAAGTTTAACTTTATTTTGCTTCTCAATAGATTTTGACTACAT
AATAGACGTGGATTTTAGTCAAACACAAGCGATATTGCAAAATTTCCGATATATATATATACACGTCTTTTTCAC
TAATAGAAAAGTAAACATATCAGCTCATCTTTTCTCTATTGGCAGTTCTCATCATCTTAATTGAAAATTTATGTT
TCCACTTTTTTTAGCTTAGATACAAACTCAACTTTGTAAAAGATTTTCTTGTTGCATATTAAATTTTACATCACA
ACAAAAAGAAAAAAAGAAATAAACAAAGGAGATCAAATAGGTTGTACATAAATTAAGCAATCATACAACATCAAA
TCAACAGCTAAAAAGTTCAGTACAATCTTTACTTCCGAATTTACTTCATTGTCTTGACATCATGTTCTAAACAAA
AACCAAACCAAAGTTCTCCACAAACCTGTCGGTTTTTAACCAAACCAAAGTTACTAGCTTAATTCAAAAAAAAAA
AAAAACAGAACTGATTCAGAAACCCCAAATTGACAAATTGTCAAATTGTCAAAAAGTGGTCATCTTTATCCTTTG
ACATCTGGTTAGTATAAAAAATTGTAATAAATGCAAACATAAGATCCAAAACTACACCTTATTAGAACGGAGGAA
TTAAGAGTGACATAACTCACTCCAACTACGACCAGTACAAGTAGTTGGCGACATTAACTACCTCTCACCAACCAC
CAAACCCAATCCCCACAATATTACCATTACTCTCATATAACTACACATATTCATATTTACATTTTTTGCCAACAC
AACTCCTTATAAGATATACACTTCATCAACCTATAGATCTCACTCACATAATCAACCTACAAAACAAAAACAAGA
SEQ ID NO: 79 pAtCER60_KCS5_At1g25450
GGAAAACAAAAAAAAGCTTCAATAAACATAAGCCAGTTTATTTTATCAAAAATGTTATGACAAATAATGTAAACA
TGAGATATGTTTTGACCAGATTGTTGTTGTCCAGACGAACAGAAACTCGAGATGCGATGTGGAAGACTCCATCAA
CACCGTTGACTGCTTCGTCAAAGCTTCCCTCTATCGTTAGATCAGCTTCGAAGATCTTCAACCTTTCTTTTGCTC
CTTTTAAGTCCCACAAGAAACCCACCTTTTCTTCATCTTCTTAATAACAAGGAAAGAAAATTACAGAATCATTTA
AGAAACCAAAAAAAAAAACTTGTGGAAGCAAACCTAAGAATCTTTGGAGGATTCTAGGTAAAGTACCTGAGTCTC
TAACAGTTGTTCTTACGTAATGACCAAATTCTAGAAGTGACTTGATAACATGAGAGGCTATAAAGCTGGTTCCTC
CGGTAACCAAGTACTCTGCCATTTTATTAGGCTCCTCTGATTTTGTGTAACATTGACAAACTAGATCATGCGATT
AGATGGTCTAATTTTATTTTATTTTGTGTTAGAAGGATGTTCAATCCTGGTTGATTTAGTTTATGTTTGACTTTT
TTTTATGTAGTCTTTGAATAATAGTAGTTACATCTAACTTTCATAAAGACTTGGATTAGTATAACCTAATTATAA
GCTTTGGGCTTGAAGCAAATATAATGAACTGAATGTGGGCTTTTAAAGTATCCAAAGAGGTTTATGAAATGTGAT
ATATTTTTTTTGGTCTTCAATCTCTTGAAAATTGGTTAGCAATCCATTGGCAGTTGAAGGCTCTCTCAGAGACCT
TGACTAGAAGGCCTCAAAGGCAAAGGAAGGTGGAAGGAAAAATCAAAATTCCCGGAGCTGAAAGTTGACACAAAG
GAATCAACCTAGTTCTTTCTTGTCTTAGCTTTTTTGAAGGGAAATGAAAATTGACACAAAAGAAGGTGGAAGGAA
AAATATGATGCTTGTCCTTTATTGGACATATCATTTTGCAGAATATATATTCTTCCTAGCATTTTGCATGCATTG
TGTCTAGGTTGTCATGTTGTGGCTGGTTTACTAAGTTCCTAGTACAATGAACAAAGCGCCAGAGCTGAAAGTTGA
AATAACAATCGTCAACATCCCAACCGCCTTAACATTAAAACCAACCAAAAAAACAAAAACACATCCCAACCGAAA
GCAGCAATCCAGGAAGATTAGTTTATGTAAATGACAAACATAAATATGAAACCGTCACATAGTTGAGAGTCGCCG
TGAATATTTACTTTTTAAATAAAAAGATATGGTTAGCCGCTGGTTGGTCTGACACCCCATGTATCATTATACTCA
TTATCCGTATGAAGGACCATTTTTTCATATAAGGATATACACGTTTGTAACGTATGCAGAGCCAACACCAAGTAT
ATAACTTGTACTGTCGTCTCTGATTCTGTTAAAGCGGTTAACTAGATTATTGACTATGATAATTCAATGTAACAC
CAATTTATGCCCCGGACAAAAAAAAAATGGTGAAACCAAAATATTTGATTTGCATCCCAGTTACTATTTCCCTGC
AATGATATGGGGGCGGCGGTTTGGAGATATCGCCAATGCCACAATTTGTCGTAAAAACAGTTAAACATTTTACTC
ACTAGTCACTCCCCACAAAAAAAACGATACTTAGTTCCACTCTCTACTACTACAAAACTTGTATACATTAAAAAA
CGATTTTTATTGAGTAGACATTAATGATCGGCTTATAAGTCTAAACAAGTAATGTGACAGAATTCACGTGAACAA
ATGCTCGAGTGGGATGTTTTTATTGCTTCTCAAGTTGGTGATCTTTAATATCGCCAAGATTAGGTTGTGCATTAA
ATTTGGATTACTTTTTATAAATTAAATCAAGATATGGATATGATAAACTTTCTCTCTTTTCTTTTAGTTAACATA
CTTTATAGACTTTATACTACATTAGATTAATTGCAGATTTAAACAATGTTTAAAATTACAAAAACGTTAAATGTC
ATATTTTCCATATAAATTTTGTTTTACGTAAAAGCAATTTACATGAATTTTGATAAAATCATGAAAAAACAGAAG
CGGTGTCCAAGATTGGGGATGAATGAGAAAACACCGCACTGATAGTAACTGAAAAGAATGTAACCAGTCTCACGA
TGGGGATGGCGGAGAGAAAGAGAGAGACAAGACAGTAGAGAAAAGAAGGTACGACGGAGAGATGAAGGTTGGACA
GAGAGAACAAAACGAGAACGGCAATGGCCGGGAAAAAAGGAGAGTAGGGAGGAAAAAAAAAAGAATTTTGTTTTT
TTAGCTTTTGTAGGGTTTTTTGTTAGTCGTAAAATATAAATTATAATATCAAAGAAAATAATGAGTTAATTTTAA
AGAAGGTTAGATGATATTTTTCACAAGTTTTTGTTGATATAGTAAACCCACAATTTTATTTTGTCATTCAAAGTA
AATTTTCAACAAAATATAGCTGTTGCTGGTCACATTTTAACGGGAAAAAATAATTCTTGTACCTGGATGTATAAC
CTCTGAACCTTGTATTACAAATTTACAAAACACATTGATCTCAATCAGACCGAACATGTATATCGAGTCAACTGA
CAAATCTCTTTTCCTACTCTTGTTACATATTCTTTCTAGGAAAAAAAAATGCTTTCAGGCTCAATGAAATGAATT
AAAACAGCAAAAGGTTGGTAAAAGTCTTTTTCCCCATAATCATTTGCTCCATAATTGACGTTTGTCTGGCAACAA
CTGGAAACACAGATATAGAAAAAAAGATTGGACAGTAAATCATAAAAAAAAAAAAGCAAAATTAAATAGAAAGAC
GAAGCGAGAGAAAGAGCGTTGAGTGGCGTGAGAGTTTGAGTCCGAAAATTAACTCCTCTCCCATCTGCCAACTTT
CCTCTGTTTCTCCTTTATATCCCAAACCTATTCTTCCTCCACACCTCATCATAGGCATAGCAAAACTCTTCCAAA

Illustrative Myb 96 protein sequences and accession numbers:

SEQ ID NO: 80 Myb96_At5g62470_NP_201053
MGRPPCCEKIGVKKGPWTPEEDIILVSYIQEHGPGNWRSVPTHTGLRRCSKSCRLRW
TNYLRPGIKRGNFTEHEEKTIVHLQALLGNRWAAIASYLPERTDNDIKNYWNTHLKK
KLKKINESGEEDNDGVSSSNTSSQKNHQSTNKGQWERRLQTDINMAKQALCEALSL
DKPSSTLSSSSSLPTPVITQQNIRNFSSALLDRCYDPSSSSSSTTTTTTSNTTNPYPSGVY
ASSAENIARLLQDFMKDTPKALTLSSSSPVSETGPLTAAVSEEGGEGFEQSFFSFNSM
DETQNLTQETSFFHDQVIKPEITMDQDHGLISQGSLSLFEKWLFDEQSHEMVGMALA
GQEGMF
SEQ ID NO: 81 AtMyb94_At3g47600_NP190344
MGRPPCCDKIGVKKGPWTPEEDIILVSYIQEHGPGNWRSVPTHTGLRRCSKSCRLRW
TNYLRPGIKRGNFTEHEEKMILHLQALLGNRWAAIASYLPERTDNDIKNYWNTHLK
KKLKKMNDSCDSTINNGLDNKDFSISNKNTTSHQSSNSSKGQWERRLQTDINMAKQ
ALCDALSIDKPQNPTNFSIPDLGYGPSSSSSSTTTTTTTTRNTNPYPSGVYASSAENIAR
LLQNFMKDTPKTSVPLPVAATEMAITTAASSPSTTEGDGEGIDHSLFSFNSIDEAEEKP
KLIDHDINGLITQGSLSLFEKWLFDEQSHDMIINNMSLEGQEVLF
SEQ ID NO: 82 ThMyb96_BAJ34253
MGRPPCCEKTGVKKGPWTPEEDIILVSYIQEHGPGNWRSVPTNTGLKRCSKSCRLRW
TNYLRPGIKRGNFTEHEEKMIVHLQALLGNRWAAIASYLPERTDNDIKNYWNTHLK
KKLKKINEFGEEDNDGFSSSNTSSQKQHQSSNKGQWERRLQTDINMAKQALCEALSL
DKPSSSTLSPSSSPLSPVIVPQNIPSFSSALLDRCYDLSSSSSSTTTTTTTTITSNTTTNPY
PSGVYASSAENIARLLQDFMKDTPKALTLTSSSPVSETGPLSAAACEEGGEGFEQSFFS
FNSMEETQNLTQETRFFHDQESKPVISMDQDHGLISQGSLSLLEKWLFDENMVGMAL
EGQEAMF
SEQ ID NO: 83 VvMyb30_XP_002284926
MGRPPCCDKIGVKKGPWTPEEDIILVSYIQEHGPGNWRAVPTSTGLLRCSKSCRLRW
TNYLRPGIKRGNFTDQEEKTIIHLQALLGNRWAAIASYLPQRTDNDIKNYWNTHLKK
KLKKFPTGVDDHNQDGFSISKGQWERRLQTDIHMAKQALCEALSIDTSSSLPDLKSS
NGYNPNTRPVQASTYASSAENIAKLLEGWMRNSPKSTRTNSEATQNSKNSSEGATTP
DALDSLFSFNSSNSDLSLSNDETANFTPETILFQDESKPNLETQVPLTMIEKWLFDEGA
ATQEQEDLIDMSLEDTAQLF
SEQ ID NO: 84 PtMyb081_XP_002323853
MGRPPCCDKIGVKKGPWTPEEDIILVSYIQEHGPGNWRAVPTSTGLLRCSKSCRLRW
TNYLRPGIKRGNFTDHEEKMIIHLQALLGNRWAAIASYLPQRTDNDIKNFWNTHLKK
KLRKLQAGQEGQSRDGLSSTGSQQISRGQWERRLQTDINMARQALCEALSPGKPSSL
LTGLKPSCGYEKPATEPIYASSTENISRLLKGWMISGPKQSLKNSTTQNSFIDTAGADS
LSSEGTPDKADKNGTGLSQAFESLFGFDSFDSSNSDFSQSMSPDTGLFQDESKPNSSA
QVPLSLIERWLFDEGAMQGKDYINEVTIDEDNLF
SEQ ID NO: 85 MtMyb_MTR4g108430_XP_003609059
MGRPPCCEKLGIKKGPWTPEEDIILVSYIQQHGPGNWRSVPTNTGLMRCSKSCRLRW
TNYLRPGIKRGNFTDHEEKMIVHLQALLGNRWAAIASYLPQRTDNDIKNYWNTHLK
RKMNKDQSSTDEGVDQESRSQLPNKGQWERRLQTDIHMAKQALSEALSLQHNPTTL
GTLPDQMKPSSSFSHSHEHPPNLNIPSPYASSYENISRLMETWMKSPNSSAETNSSSIFS
NMQGSSCSEGAQSTTQDHHGLNSSKSDYASRFRSSHEGNNSFNLNTKEGLFFHQEER
INIKANMETHVPLTLLEKWLFEDGGASHECHEELINMSLEGTTSDFF
SEQ ID NO: 86 MtMyb_MTR_3g039990_XP_003599668
MVRPPCCEKIGVKKGPWTPEEDIILVSYIQEHGPGNWRSVPTTTGLMRCSKSCRLRW
TNYLRPGIKRGNFNDHEEKMIIHLQALLGNRWAAIASYLPERTDNDIKNYWNTHLRK
KLKKINQTGDENEVEENSIPQVKGQWERRLQTDIHMAKQALCEALSLDKPTPILAEN
QTSPYASNTENIARLLEKWMKKPENSVETTNSGNSIMVVTGSGSREGGQNTIACKQK
DQAFDSLVSFNSLNSDCSQSVSVEEKNFLAMDSCFFQYQSKPNQETQDPLMFMENW
PFDDEAAQCNEDLMNVSMEENTPGLF
SEQ ID NO: 87 CmMyb60_ABK59039
MGRPPCCDKIGIKKGPWTPEEDIILVSYIQEHGPGNWRAVPTNTGLLRCSKSCRLRWT
NYLRPGIKRGNFTDQEEKMIIHLQALLGNRWAAIASYLPQRTDNDIKNYWNTHLKK
KVKKLQLAAAGCSEDNSQYRDELASASSQQISRGQWERRLQTDIHMAKQALCAALS
PDKASILSELKPANGFISYTKPAVQAPTYASSTENIAKLLKGWARNAQKSASSNSGVT
DQNSINNNVNHIAGAESASSEETPSKVASNSTGIELSEAFESLFGFESFDSSNSTDLSQS
VTPESSTFQDYESKQLLLDPSASADDDQMPQLSLIEKWLFDDQGAKDYLNDLKLDD
HEDTDMF
SEQ ID NO: 88 BdMyb_XP_003574549
MGRPPCCDQAGVKKGPWTPEEDLMLVSYIQEHGPGNWRAVPTNTGLMRCSKSCRL
RWTNYLRPGIKRGNFTDQEEKLIVHLQALLGNRWAAIASYLPERTDNDIKNYWNTH
LKRKLKKMSAAAGEDGAAAATAGGAEAKSRATAPKGQWERRLQTDIHTARQALR
DALSLDTTAPAPPKPAPMERSSKGAVYASSAENIARLLEGWMRPGEGKASSGGSGSG
SRSSASVVSAEGASASHSGTAPTPEGSTVTSKTKDEVAVAAPPAFSMLENWLFDDGM
GMGHNGIGDVGLDDVPLGDPSEFF
SEQ ID NO: 89 BdMyb_XP_00356188
MGRPPCCDKDGVKKGPWTPEEDIILVSYVQDHGPGNWRAVPPNTGLMRCSKSCRLR
WTNYLRPGIRRGNFSEQEEKHIVQLQALLGNRWAAIASYLPDRTDNDIKNYWNTHL
KKKLLHRTSTATPAPAPTTHKDQNNNKGQWERRLQTDIHLARQALREALSLDTAST
SATPGPAAYALSAQNVSRMLDDWAVAADSASSEVTECSGGSTASNGTLWSSLLGRE
STGAAAAGVEDPAALSAIESWLLLDDGTDRQQPPEQEQSGGQLLP
SEQ ID NO: 90 TaMyb_AEV91147
MGRPPCCDKEGVKKGPWTPEEDLVLVSYVQEHGPGNWRAVPTRTGLMRCSKSCRL
RWTNYLRPGIKRGNFTDQEEKLIVHLQALLGNRWAAIASYLPERTDNDIKNYWNTH
LKRNLQAGGDAAAKPAAQRPASSSKGQWERRLQTDINMARRALREALTTLDDIKRQ
QPDAADGVNGPAAAGADSGSPAASSSSAASLSQCSPSAAGPYVLTTANISRMLDGW
ASKGRSAVPAADSPSGSSASEVSYGSGAAARALGSAFEYDRKPAVLAPDQTQLNAIE
TWLFADDNSNNDHHGHGGGGSGLLGVPATLGYPF
SEQ ID NO: 91 OSMyb_Os09g0414300_NP_001063167
MGRPPCCDKVGVKKGPWTPEEDLMLVSYIQEHGAGNWRAVPTNTGLMRCSKSCRL
RWTNYLRPGIKRGNFTEQEEKLIVHLQALLGNRWAAIASYLPERTDNDIKNYWNTH
LKKKLKKMQAAGGGEDSGAASEGGGGRGDGDGGGKSVKAAAPKGQWERRLQTDI
HTARQALRDALSLDHPDPSPATAAAAATPAGSSAAYASSADNIARLLQGWMRPGGG
GGGNGKGPEASGSTSTTATTQQQPQCSGEGAASASASASQSGAAAAATAQTPECSTE
TSKMATGGGAGGPAPAFSMLESWLLDDGGMGLMDVVPLGDPSF
SEQ ID NO: 92 OSMyb_Os08g0437200_NP_001175597
MGRPPCCVKAEVKKGPWTPEEDLMLVAYVQEHGPGNWRAVPTNTGLMRCSKSCR
LRWTNYLRPGIKRGNFTDQEEKLIVHLQALLGNRWAAIASYLPERTDNDIKNYWNT
HLKKKLKKMSATGGGGDDGEGGGAGEVKTRAAAPKGQWERRLQTDIHTARQALR
DALSLDPSPPAKPLDSSSGATAPPSSQAATSYASSAENIARLLEGWMRPGGGGGKTTT
TPSSGSRSSAASVLSGEASHSGGATAPTPDGSTVTSKTKDEETAGAPPPPPPPAFSMLE
SWLLDDGMGHGEVGLMDVVVPLGDPSEFF
SEQ ID NO: 93 ZmMyb_NP_001132068
MGRPPCCEKAGLKKGPWSPEEDLLLVSYVQEHGPGNWRAVPCSTGLMRCSKSCRLR
WTNYLRPGIKRGSFSDQEEKLIIHLQELLGNKWSAIASYLPERTDNDIKNYWNTHLK
KKLAKTGARESGASAKTTKKSDRAAAPKGQWERRLQTNIHTARQALREALSMDDT
APPAIKPEPLPLPLGQLPAPASQAMYASSIDNIARLLEGWMRPSVSGNASAESMSSFS
AFSGGGDGASASHIGTAHTPEGFTGTRKEEGAGPGPASLPMFENWLLDDGMGNGDA
SLICVPLADPCEFF
SEQ ID NO: 94 Illustrative REF4 promoter At2g48110; NP_566125 (encoded protein
sequene)
TTTCGCAGGCCCTAATTAAGACATTCAAGAAAACAAGAAGAAGCATAAGAAGAGGCCTAAATGCCCAGAGAATT
AAACAAATGGGCCTTTAACAATATTTTAAACAACACTGAACAATAGATGAGATCTCAACTTCGAAAAGCTAAAGC
CTTAATATAAAACCAAACATCAATCTCTCGCCGTTAAGGTTACATCTGTCGCCGCCGCTGAGACCGCCACTTAAG
GCCGTCTCCTCCGCTCTATCCATATCCAAAACAGCTATAAAGATAAACTTCCAGAGCTTGGTGAAGGAGCAGCAA
CCCTAGTTTTCAATCCCTAAAGGTGAAGTTTTTGTTCTTCTTTTTCTTTGATTCTACTCTTTTTTCGTCACAATA
GCGCAGTAGCGATCTGGGTTGGCGTTTTTATTGACGGATTTTGGTGGGTTTGGGTTCGTGTTAGATTTTACTTTC
ACAGATTCAGGTATGTATTTGATCTTATTTAGCTTTGGTAATACTCAAACCAACTAGTATTTGATCTTAATTAGG
TGACGTTGATATTTTGTGTGTTGTGGGTCAATCATCCACTCTAGGTTGATCTGCGTCTATGTTTAGTCCTAATTT
TGAAGAATCATTCTAATTGCTGATGTTTATTTATGACAATTTTATGTCTTACTTCGAATTTAGCTAAGATAATAA
ATCTAGACGAGTGCCTTTATAAACAGTTTATGTATGAACAATGCTTCGCTTGTGGGATTGTTGATTTCACTACAT
TTGATTAAGAATGTACATACTATTACAAATGTTATCGATTAAAAACGTCATTTTCAGATATTAGTTCTCCAGCGA
GTTGACACAAAACCCGATTACGTTTCATCCGGCGACTCGCTTTGATATTCCATGGATTCTCAGTTGAATCCTTCC
AAGAGACGCAAGATAAGGTTCGCGTCTCTCATCTTTTCCCCAGTTTTTTTTCTTATTCGAATCACTTAAGGCTTG
AGAAATTAGTGGTTAGGGTGTGTAAATTGCGTTTGATATAGTGTCAGGCACAGATGCGTTGCGTGCTATAAGATG
TTCAATAGACGAGAACACCTCGTTGAGCACATGAAGATTTCCTACCACTCACTTCACCAGCCTCGCTGTGGGGTT
TGCCTCAAGCACTGTAAATCCTTCGAATCCGTGAGGGAACACCTTAACGGTATGTTTGTATTTGTATTCGTTTTC
CACCACACATCGTATGAATATGGTGGTTGTTGATGTTTGTTTGATTCCGTCTTTCCAACTATTTCAGTTCCAGAC
CATCTTTCCAAAGGAAACTGCAAAGCCATTTTCACTAAACGAGGCTGTACTCTCTGTCTTCAAATCTTTGAGGAG
GCCTTTGCTCTCGCCGAGCATAAAAACAAGTGTCACCTCTCCCCACCTCGTCCTCTTGTAAGTTTTGTTGGGAAT
TATTTAGATAATGTGGACTATATATGCTCTGCCGCCTCCAATATTCCCGAGTCTATTCTTTCTGATTATTGAAAT
ATCAGCAGTTTTCCCCTTAAATGATCTGATTAGTGCTTTATTCATATCAGGGAACATCTACCCAAAGGAATCCTT
CTAGTTCACTTGCTGGTTCACGTCTCAAGGCTATGGCACTTGACTGTGAAATGGTTGGTGGTGGTGCTGATGGGA
CTATTGATCAGTGCGCATCGGTTTGCCTGGTTGACGATGACGAGAATGTGATCTTCTCCACTCACGTTCAACCAC
TGCTCCCTGTCACCGATTACAGGTTCTGCTTGTGGACCATTTGTGCTTGTTTTGTTTTATAATTCTTCCTTTTAA
ATCTCACCCCGCCTCATGTTCAGGCACGAGATAACTGGATTGACTAAGGAAGATTTGAAGGATGGTATGCCACTT
GAGCATGTACGAGAGAGAGTTTTTTCGTTCTTGTGCGGTGGACAGAATGATGGGGCTGGAAGGCTTCTTCTTGTT
GGTCATGACCTTAGGCATGATATGAGTTGCTTGAAGCTTGAATACCCTAGCCATTTGTTGAGGTAACTAACTGAC
CCGTTTTTGTTGACTCTTTGCTTGAAATCTAATGTAATTGCTATGCTTCACCTCAGAGACACAGCAAAATACGTG
CCGTTGATGAAGACAAATCTTGTAAGCCAATCGCTCAAGTACCTCACAAAGTCATATCTCGGGTAAGTTATGCTT
GGGCTTTGATTTGTTGACATTGGATTATGAAAACTTGGAACATGAGATAGAAACTGGTTTTGTTTGTATGTGTAG
ATACAAGATCCAGTGCGGGAAGCACGAGGTTTACGAGGACTGTGTATCTGCGATGAGACTGTACAAGAGAATGCG
GGATCAAGAGCATGTTTGTAGTGGAAAGGCAGAAGGGAATGGTCTGAACTCGCGGAAACAGAGCGATCTAGAGAA
GATGAATGCGGAAGAGCTGTACCAAAAATCAACGTCAGAGTACCGGTGCTGGTGCCTTGACCGACTCAGCAATCC
ATGAAATGAAATCCCAATTTCTCTTTTAAAAGAAAGCTCCTTCTCTTCCTCCCTTAAGTCTCTTTTTGTTCGATG
GGAGGATTAAGAAGACTTGTTAAGAGCTTTTCCGGCTAGTTTTTGGATAATCAAATATGATATGGCTTCATTCAA
CAACAACTCTCCCTTTGGGAACTCGTATAAAAAGTTACTACTTAAGCTTCAAATCTGTGTAACTAAAATGGATAA
AGTCTGATGCATCTGAGGTCTTGGAATCTGTTGCTCATAGTTGTGGATACCAGCAACATCAAACATTATTACTTG
TTTACCAAACCCACTCTCAGCTTCCATTTCATCAGTTTGAAGTCAAGTGGATAAAAAGACTGTCTACATAACTCA
AATACTGTAGTATTATATTCACATATAAATGAGAAATTGACATTTCCTCTAGAAAAAGAAAAGCAATCGTGTGAG
AAGAAACAAGTAAAAGGCTGAGGAAGAAGACGACTATTAGTCCCCGTCGAACTTGTTTCTCCCGGTCGTCCAACA
A
SEQ ID NO: 95 Illustrative RFR1 promoter At3g23590; NP_189001 (encoded protein
sequence)
AAATGATTTGTTTTGTGAATAGTTGATTCCAGCTAATGTGGTGAAAGACAATCATCTTACGTTTGGTGATTGTAT
CAACTACATTGATGAAGAAGGGAACTTAGTAGGACAAAGAGGGAATAAGCAGATGATAGGATTTGCTTCAAAGGA
TGCATGGCGACATAATTTGCAGAAGGATTAGACATAATAACATGAAGATACTGTCAAGTATGAGCTCCTTCATGA
ACTTAAGTACGTTCATAATTCCACTTGATCCACAACTTTGGGCTATTGGTATAAAAAGCTAACTTTATCTAGATT
ACATGCTACATCTCAATTCAAGATGTCCATTTATTAAAGCAAAGGCATGACTTTATCTTCGACTAGAAACTGGTG
ATGGACCATCCTCAACCTCCACTAGCATCATCTCCACCTACTCCTAACCACTAACCCAATTATCCTTTTCACCTT
TTCCTCTCAACACTATCCTATTTTTAGGTGATTTAGGGAAAAGAGAAATACTACACTTTGATGTAATTTTTTTTT
TAATTGAATTGAGCTTTGAATACTATGGTTAATATGGATGAAAGAAAACACACGTTCCTACTAATTTCTTTTTCT
AAATGATGACGTTTTCTCAAGTTACTTATCGTAGTCTAATCGGTTATTGACAAAAATGATCTAGACGTTTGAAAA
TCATTGGCCAACCTCTTCACTAGATAGAATTTTTATTTCTAACCATTACCTACCTGATACACACACCAAGTTCTG
AATCTAGAGATGATCTTGTCTCATTTGTTTATAGACTAAAGAGTATATAAAAGCTGGATTCATGTGGGTCATCCA
TCATTAATCGTGTTCTTCAATTCACCAACTTCGTAGGTTCCGCATCTTTTGTACTTTCTTTCTATTTTTAATCTT
GCAATATCAAAAATAAATATATACACCTTTTAAAAAAATTCTGAATATGCATATGGTAATGGTATCATCAGAAAA
CATTGAATATTGAATCGTCTATCTACCAATCTCTTCAAGTTGTGAATTTTATTTATCAAAAAAAAAAAAAAAATC
AACTGAAACGTCAATGTTATGTTTTGCTTCAATCTAAAGAAAGTTGTACCAAAAATAAAGTACTTTTTTACCAAG
AAATTTCGGATTGTAGCCAAAATATGTCTTGTTTTATTTTTTTTGTTCACCAAAAATATGTTAAACTAGTTTTTT
GACTTTTTCCCCCATGCGTTGTTGTTGTTATTCGGACGACCAATATTTAATACAGTATTCAAGTGTAGCTAAGCT
ACTGATTCCAGATAAAGTAAAAAAATGTCTTTGATACCAACTTCACTTTGACCAATTATCGAACTCTTTAATTTC
ATAATATATAGCTTTGACAAATATCCCATCAGAATTCATAAATCGCCACATGAATCTTATAATTGTCAACTATGT
GCAGTCCAATATTAATATCATGGAAAACTAGATTACTAGCATTTAATTTCTTAATTGTATTTAGGTTATAGACTT
AACATGGTTTTTCTTCTAGAGCATTTTCACTACATTTTTTTCTTTCTATGTTATTATTTTATGTTTTACTTATTG
TTACATCCATTTACAACGATGTTGGATAAAATATTTTTAACTGTTCAGTCCGTAAATGACTAGCTAAATTTTTAC
GGATATATTTTTACATAAAAAAAGAAATTATTTTTACGATTTACCAATTTAACTCTTCTTTCTCTCTAAGTTTTC
ATTTATTAAAAATGATAGTTTTTTTAAGAAAGTTATTTGTATTTATTTATTTAAAATTGGATGCAAAAAATTACA
AAACTTGGAAGAAATATTGTTAACCCATCTTTATCAGTATAGAATTTCTGATTACTCCCTGCGTTGAAAATAAGA
AGATCCATAGAACGTGGTAATGTTTTTTTTTTTTTTTTTCTGGCAAGAAATGGTAATGTTAATCAATTAGACTCA
TGACTAAAGCTGGAAAATTTGACTAAAATGGTATTATCTTGCATTATTACCTAAAAGCTCTTCTTGCATTACTCT
TTCATGCAAAATTGCCTCCAAAAGTCATACTTCGAAATCATGGCTTTGTAACTCACCCTTGCCACCATCTATCTA
AACTTATTATTGTTTAAAACAAAATTGATTTTCAAAGAAAAAAAAAATATAAACTCCCACCGGTCAATAACTTTT
AATTTTCACTTCAATTATTCATAAAATAAATATATACACCTTGATTCTTTCTTAATAACTGGAGTTATTTTGAAT
TTAAATTACTTTTGAAATACAAAAGAAAGTAAGATAATTTTGCCATTTAAAATGTCTACAACAATTATGTTAACA
CTTAACATACATTTTTAGAACCAAATGGTAATGGTCCACTAGTTAAAAGATTTCTTATGAATGTCTTTTTATGCA
GAGTTCGAATTTTCTCACAACGATTTTAACCATTTTCGTCACTCGCAAAATTTTTAGTGGATAACAAAAAAAAAA
AAAAGTTGAAATTTAATGGAAATTTAGGAGATTTGTCCAATTTTTAATTTTCCCGATTAATTTAAAAAATCTACT
TTACGCCTTTTATTGACAAAGATGCATATTAACTATATATATATATATATATATATATATATATATATATATATA
TTATAAACTAAATTTTGTAGAACCCATCAGAAGAAATTTGTACTTTTAACTTTAAAATCAATTAAAAAATTTCAA
TTCAAATAAAAAAAAATCCAAAATTGTTTATAAATTCAAGAAATATAACACACAAGTTGACATAAACAGTGGAGA
GATTTGTGAAATGTGAACTCTTTTGACGTCTTTCTCATATTTCGTCTCGGGACAATTCACACGCACTGAATCATC
TCTCTCACGAGGACTATTCAGCCATTTGCAAACGCACACACAAACGCACACGCGTTTATTTTTTTTTCGCCAAAT
CAAATCTGAAGAGTTCCTGTATCTTTTAACCGCTCTTCTTCTTCTTCAGAGAGCTTCGTTGATTGAACGGAAAAA
Legend: At: Arabidopsis thaliana; Th: Thellungiella halophila; Mt: Medicago truncatula; Pt: Populus trichocarpa; Vv: Vitis vinifera; Cm: Citrus macrophylla; Bd: Brachypodium distachyon; Ta: Triticum aestivum; Os: Oryza sativa; Zm: Zea mays

1. A method of engineering a plant to increase the production of a biosynthetic product in a desired tissue, the method comprising:
introducing an expression cassette into the plant, wherein the expression cassette comprises a polynucleotide encoding a transcription factor that regulates production of the biosynthetic product operably linked to a heterologous promoter, wherein the heterologous promoter is a promoter that induces gene expression of a gene that is a downstream target of the transcription factor in the desired tissue; and
culturing the plant under conditions in which the transcription factor is expressed.

2. The method of 1, wherein the promoter is a tissue-specific secondary wall promoter and the transcription factor induces expression of secondary wall biosynthetic products.

3. The method of claim 2, wherein the transcription factor is NAC secondary wall-thickening promoting factor 1 (NST1), NST2, NST3, secondary wall-associated NAC domain protein 2 (SND2), SND3, MYB domain protein 103 (MYB103), MBY85, MYB46, MYB83, MYB58, or MYB63 and/or the tissue-specific secondary wall promoter is an IRX1, IRX3, IRX5, IRX8, IRX9, IRX14, IRX7, IRX10, GAUT13, GAUT14, or CESA4 promoter.

4. (canceled)

5. The method of 1, wherein the transcription factor induces expression of wax and/or cutin.

6. The method of claim 5, wherein the transcription factor is a shine (SHN) transcription factor selected from SHN1 (also known as WIN1), SHN2, SHN3, SHN4, or SHN5; or MYB 96; and/or the promoter is a CER1, CER2, CER3, CER4, CER5, CER6, CER10, WSD1, Mah1, WBC11, KCS1, KCS2, FATB, LACS1, LACS2, CYP864A, CYP86A7, CYP86A5, KCS10, or KCS5 promoter.

7.-8. (canceled)

9. A method of engineering a plant having lignin deposition that is substantially localized to the vessels of xylem tissue of the plant, the method comprising:
introducing an expression cassette into the plant, wherein the plant is modified to have a reduced level of expression of a lignin biosynthesis enzyme; and further, wherein the expression cassette comprises a polynucleotide encoding the lignin biosynthesis enzyme operably linked to a heterologous vessel-specific promoter; and
culturing the plant under conditions in which the lignin biosynthesis enzyme is expressed.

10. The method of claim 9, wherein the lignin biosynthesis enzyme is PAL, C4H, 4CL, HCT, C3H, or CCR1.

11. (canceled)

12. The method of claim 9, wherein the promoter is a VND1, VND2, VND3, VND4, VND5, VND6, VND7, VNI2, REF4, or RFR1 promoter.

13. The method of claim 9, wherein the level of expression of the lignin biosynthesis enzyme in the modified plant is reduced by contacting the plant with an antisense oligonucleotide that silences expression of the gene encoding the lignin biosynthesis enzyme.

14. The method of claim 9, wherein the modified plant in which the polynucleotide operably linked to the heterologous promoter is expressed has a mutation in the gene encoding the lignin synthesis enzyme that decreases expression of the enzyme.

15. (canceled)

16. A plant engineered by the method of claim 1, or a progeny of the plant.

17.-18. (canceled)

19. A plant cell comprising a polynucleotide encoding a lignin biosynthesis enzyme operably linked to a heterologous vessel-specific promoter, wherein the plant cell is engineered by the method of claim 9.

20. The plant cell of claim 19, wherein the lignin biosynthesis enzyme is PAL, C4H, 4CL, HCT, C3H, or CCR1; and/or the promoter is a VND1, VND2, VND3, VND4, VND5, VND6, VND7, VNI2, REF4, or RFR1 promoter.

21. (canceled)

22. A plant comprising the plant cell of claim 19, wherein the plant has lignin deposition that is substantially localized to the vessels of xylem tissue of the plant.

23. (canceled)

24. A method of obtaining an increased amount of soluble sugars from a plant in a saccharification reaction, the method comprising:
subjecting the plant of claim 16 to a saccharification reaction, thereby increasing the amount of soluble sugars that can be obtained from the plant as compared to a wild-type plant.

25. A method of engineering a plant having increased secondary cell wall deposition, the method comprising:
introducing an expression cassette into the plant, wherein the expression cassette comprises a polynucleotide encoding a transcription factor that regulates the production of secondary cell wall in woody tissue operably linked to a heterologous promoter, wherein the promoter enhances expression of a gene that is a downstream target of the transcription factor; and
culturing the plant under conditions in which the transcription factor is expressed.

26. The method of claim 25, wherein the transcription factor is NST1, NST2, NST3, MYB103, MYB85, MYB46, MYB83, MYB58, or MYB63; and or the promoter is an IRX1, IRX3, IRX5, IRX8, IRX9, IRX14, IRX7, or IRX10 promoter.

27.-29. (canceled)

30. The method of claim 25, wherein the plant in which the polynucleotide operably linked to the heterologous promoter is expressed is a wild-type plant.

31. The method of claim 25, wherein the plant in which the polynucleotide operably linked to the heterologous promoter is expressed is an engineered plant having lignin deposition that is substantially localized to the vessels of xylem tissue of the plant.

32. (canceled)

33. A plant engineered by the method of claim 25, or a progeny of the plant.

34.-41. (canceled)

42. A method of increasing bioenergy production from biomass derived from a plant, the method comprising:
harvesting biomass from the plant of claim 33; and
subjecting the biomass to a conversion reaction, thereby increasing bioenergy production as compared to a wild-type plant.

43. A method of increasing stem, straw or timber strength from plants during growth, the method comprising
cultivating the plant of claim 33 to produce seed, wherein resistance lodging is improved as compared to a wild type plant.

44. A method of obtaining a plant having improved resistance to mechanical stress, the method comprising:
cultivating the plant of claim 33, thereby obtaining a plant having improved resistance to mechanical stress compared to a wildtype plant that has not been genetically modified to increase secondary cell wall production.

45. A method of engineering a plant having xylan deposition that is substantially localized to the vessels of xylem tissue of the plant, the method comprising:
introducing an expression cassette into the plant, wherein the plant is modified to have a reduced level of expression of a xylan biosynthesis enzyme; and further, wherein the expression cassette comprises a polynucleotide encoding the xylan biosynthesis enzyme operably linked to a heterologous vessel-specific promoter; and
culturing the plant under conditions in which the xylan biosynthesis enzyme is expressed.

46. The method of claim 45, wherein the xylan biosynthesis enzyme is irregular xylem 8 (IRX8), IRX14, IRX14-like, IRX9, IRX9-like, IRX7, IRX10, IRX10-like, IRX15, IRX15-like, F8H, or PARVUS; and/or the promoter is a VND1, VND2, VND3, VND4, VND5, VND6, VND7, VNI2, REF4, or RFR1 promoter.

47. (canceled)

48. The method of claim 45, wherein the level of expression of the xylan biosynthesis enzyme in the modified plant is reduced by contacting the plant with an antisense oligonucleotide that silences expression of the gene encoding the xylan biosynthesis enzyme.

49. The method of claim 45, wherein the modified plant in which the polynucleotide operably linked to the heterologous promoter is expressed has a mutation in the gene encoding the xylan synthesis enzyme that decreases expression of the enzyme.

50. (canceled)

51. A plant engineered by the method of claim 45, or a progeny of the plant.

52.-58. (canceled)

59. A method of obtaining an increased amount of soluble sugars from a plant in a saccharification reaction, the method comprising:
subjecting the plant of claim 51 to a saccharification reaction, thereby increasing the amount of soluble sugars that can be obtained from the plant as compared to a wild-type plant.

60. A method of obtaining an increased C6/C5 sugars ratio from a plant after a hydrolysis reaction, the method comprising:
subjecting the plant of claim 51 to chemical or enzymatic hydrolysis, thereby increasing the amount of C6 sugars compared to C5 sugars that can be obtained from the plant as compared to a wild-type plant.

61. A method of engineering a plant having xylan O-acetylation that is substantially localized to the vessels of xylem tissue of the plant, the method comprising:
introducing an expression cassette into the plant, wherein the plant is modified to have a reduced level of expression of an enzyme responsible for xylan O-acetylation; and further, wherein the expression cassette comprises a polynucleotide encoding the xylan O-acetylation enzyme operably linked to a heterologous vessel-specific promoter; and
culturing the plant under conditions in which the xylan O-acetylation enzyme is expressed.

62. The method of claim 61, wherein the xylan O-acetylation enzyme is an RWA protein.

63. The method of claim 61, wherein the promoter is a VND1, VND2, VND3, VND4, VND5, VND6, VND7, VNI2, REF4, or RFR1 promoter.

64. The method of claim 61, wherein the level of expression of the xylan O-acetylation enzyme in the modified plant is reduced by contacting the plant with an antisense oligonucleotide that silences expression of the gene encoding the xylan O-acetylation enzyme.

65. The method of claim 61, wherein the modified plant in which the polynucleotide operably linked to the heterologous promoter is expressed has a mutation in the gene encoding the xylan O-acetylation enzyme that decreases expression of the enzyme.

66. (canceled)

67. A plant engineered by the method of claim 61, or a progeny of the plant.

68.-74. (canceled)

75. A method of obtaining an increased amount of soluble sugars from a plant in a saccharification reaction, the method comprising:
subjecting the plant of claim 67 to a saccharification reaction, thereby increasing the amount of soluble sugars that can be obtained from the plant as compared to a wild-type plant.

The application's sequence listing, which the Patent Office published only in electronic form, follows.

SEQUENCE LISTING (339 sequences)

SEQ ID NO: 1 - DNA, 2178 bp, Arabidopsis thaliana
  phenylalanine ammonia lyase (PAL1), At2g37040
atggagattaacggggcacacaagagcaacggaggaggagtggacgctatgttatgcggcggagacatcaagacaaagaacatggtgatcaacgcggaggatcctctcaactggggagctgcagcggagcaaatgaaaggtagccatttggatgaagtgaagagaatggttgctgagtttaggaagccagttgtgaatcttggtggtgagactctgaccattggacaagtggctgcgatctcaactattggtaacagtgtgaaggtggagctatcggagacagctagagccggtgtgaatgctagtagtgattgggttatggagagtatgaacaaaggcactgatagttatggtgttactactggttttggtgctacttctcatcggagaaccaaaaacggtgtcgcacttcagaaggaacttattagattccttaacgccggaatattcggaagcacgaaagaaacaagccacacattgccacactccgccacaagagccgccatgcttgtacgaatcaacactctcctccaaggattttccggtatccgatttgagattctcgaagcaattaccagtttcctcaacaacaacatcactccatctctccccctccgtggtacaatcaccgcctccggagatctcgttcctctctcctacatcgccggacttctcaccggtcgtcccaattccaaagctactggtcccaacggtgaagctttaacagcagaggaagctttcaaattagcaggaatcagctccggattctttgatctccagcctaaggaaggtctcgcgctagtcaatggcacggcggttggatctggaatggcgtcaatggtgttattcgaaacgaatgttctctctgttttggctgagattttgtcggcggttttcgcagaggtgatgagtggtaagcctgagttcaccgatcatctcactcacagacttaaacatcatcccggtcaaatcgaagcggcggcgataatggagcatatcctcgacggaagctcgtacatgaaattagctcagaagcttcacgagatggatccgttacagaaacctaaacaagatcgttacgctcttcgtacttctcctcaatggttaggtcctcaaatcgaagtgatccgttacgcaacgaaatcgatcgagcgtgagattaactccgtcaacgataatccgttgatcgatgtttcgaggaacaaggcgattcacggtggtaacttccaaggaacaccaatcggagtttcaatggataacacgagattggcgatagcagcgattggtaaactcatgtttgctcaattctcagagcttgtgaatgatttctacaacaatggtttaccctcgaatctaaccgcttcgaggaatccaagtttggattatggattcaagggagctgagattgcaatggcttcttattgttcagagcttcaatacttagctaatcctgtgactagccatgttcaatcagcagagcaacataaccaagatgtcaactctttgggactaatctcgtctcgcaaaacttctgaagctgttgatattctcaagcttatgtcaacaacgttcctcgttgcgatttgtcaagctgtggatttgagacatttggaggagaatttgagacagactgtgaagaacactgtctctcaagtggcgaagaaagttcttactactggagtcaatggtgagcttcatccttctcgcttctgcgaaaaggatttactcaaagttgtagaccgtgaacaagtctacacatacgcggatgatccttgtagcgcaacgtacccgttgattcagaagctgagacaagttattgttgaccatgctttgatcaatggtgagagtgagaagaatgcagtgacttcaatcttccataagattggagctttcgaggaggagcttaaggcagtgctaccgaaagaagtggaagcagcaagagcagcctacgataacggaacatcggctatcccgaacaggatcaaggaatgtaggtcgtatccattgtatagattcgtgagggaagagcttggaacagagcttttgaccggagagaaagtgacgtcgcctggagaagagttcgacaaggttttcacggcgatttgtgaaggtaaaatcattgatccgatgatggaatgtctcaacgagtggaacggagctcccattccaatatgttaa

SEQ ID NO: 2 - protein, 725 aa, Arabidopsis thaliana
  phenylalanine ammonia lyase (PAL1, AtPAL1)
MEINGAHKSNGGGVDAMLCGGDIKTKNMVINAEDPLNWGAAAEQMKGSHLDEVKRMVAEFRKPVVNLGGETLTIGQVAAISTIGNSVKVELSETARAGVNASSDWVMESMNKGTDSYGVTTGFGATSHRRTKNGVALQKELIRFLNAGIFGSTKETSHTLPHSATRAAMLVRINTLLQGFSGIRFEILEAITSFLNNNITPSLPLRGTITASGDLVPLSYIAGLLTGRPNSKATGPNGEALTAEEAFKLAGISSGFFDLQPKEGLALVNGTAVGSGMASMVLFETNVLSVLAEILSAVFAEVMSGKPEFTDHLTHRLKHHPGQIEAAAIMEHILDGSSYMKLAQKLHEMDPLQKPKQDRYALRTSPQWLGPQIEVIRYATKSIEREINSVNDNPLIDVSRNKAIHGGNFQGTPIGVSMDNTRLAIAAIGKLMFAQFSELVNDFYNNGLPSNLTASRNPSLDYGFKGAEIAMASYCSELQYLANPVTSHVQSAEQHNQDVNSLGLISSRKTSEAVDILKLMSTTFLVAICQAVDLRHLEENLRQTVKNTVSQVAKKVLTTGVNGELHPSRFCEKDLLKVVDREQVYTYADDPCSATYPLIQKLRQVIVDHALINGESEKNAVTSIFHKIGAFEEELKAVLPKEVEAARAAYDNGTSAIPNRIKECRSYPLYRFVREELGTELLTGEKVTSPGEEFDKVFTAICEGKIIDPMMECLNEWNGAPIPIC

SEQ ID NO: 3 - DNA, 1518 bp, Arabidopsis thaliana
  cinnamate 4-hydroxylase (C4H), At2g30490
atggacctcctcttgctggagaagtctttaatcgccgtcttcgtggcggtgattctcgccacggtgatttcaaagctccgcggcaagaaattgaagctacctccaggtcctataccaattccgatcttcggaaactggcttcaagtcggagatgatctcaaccaccgtaatctcgtcgattacgctaagaaattcggcgatctcttcctcctccgtatgggtcagcgaaacctagtcgtcgtctcctcaccggatctaacaaaggaagtgctcctcactcaaggcgttgagtttggatccagaacgagaaacgtcgtgttcgacattttcaccgggaaaggtcaagatatggtgttcactgtttacggcgagcattggaggaagatgagaagaatcatgacggttcctttcttcaccaacaaagttgttcaacagaatcgtgaaggttgggagtttgaagcagctagtgttgttgaagatgttaagaagaatccagattctgctacgaaaggaatcgtgttgaggaaacgtttgcaattgatgatgtataacaatatgttccgtatcatgttcgatagaagatttgagagtgaggatgatcctcttttccttaggcttaaggctttgaatggtgagagaagtcgattagctcagagctttgagtataactatggagatttcattcctatccttagaccattcctcagaggctatttgaagatttgtcaagatgtgaaagatcgaagaatcgctcttttcaagaagtactttgttgatgagaggaagcaaattgcgagttctaagcctacaggtagtgaaggattgaaatgtgccattgatcacatccttgaagctgagcagaagggagaaatcaacgaggacaatgttctttacatcgtcgagaacatcaatgtcgccgcgattgagacaacattgtggtctatcgagtggggaattgcagagctagtgaaccatcctgaaatccagagtaagctaaggaacgaactcgacacagttcttggaccgggtgtgcaagtcaccgagcctgatcttcacaaacttccataccttcaagctgtggttaaggagactcttcgtctgagaatggcgattcctctcctcgtgcctcacatgaacctccatgatgcgaagctcgctggctacgatatcccagcagaaagcaaaatccttgttaatgcttggtggctagcaaacaaccccaacagctggaagaagcctgaagagtttagaccagagaggttctttgaagaagaatcgcacgtggaagctaacggtaatgacttcaggtatgtgccatttggtgttggacgtcgaagctgtcccgggattatattggcattgcctattttggggatcaccattggtaggatggtccagaacttcgagcttcttcctcctccaggacagtctaaagtggatactagtgagaaaggtggacaattcagcttgcacatccttaaccactccataatcgttatgaaaccaaggaactgttaa

SEQ ID NO: 4 - protein, 505 aa, Arabidopsis thaliana
  cinnamate 4-hydroxylase (C4H, AtC4H)
MDLLLLEKSLIAVFVAVILATVISKLRGKKLKLPPGPIPIPIFGNWLQVGDDLNHRNLVDYAKKFGDLFLLRMGQRNLVVVSSPDLTKEVLLTQGVEFGSRTRNVVFDIFTGKGQDMVFTVYGEHWRKMRRIMTVPFFTNKVVQQNREGWEFEAASVVEDVKKNPDSATKGIVLRKRLQLMMYNNMFRIMFDRRFESEDDPLFLRLKALNGERSRLAQSFEYNYGDFIPILRPFLRGYLKICQDVKDRRIALFKKYFVDERKQIASSKPTGSEGLKCAIDHILEAEQKGEINEDNVLYIVENINVAAIETTLWSIEWGIAELVNHPEIQSKLRNELDTVLGPGVQVTEPDLHKLPYLQAVVKETLRLRMAIPLLVPHMNLHDAKLAGYDIPAESKILVNAWWLANNPNSWKKPEEFRPERFFEEESHVEANGNDFRYVPFGVGRRSCPGIILALPILGITIGRMVQNFELLPPPGQSKVDTSEKGGQFSLHILNHSIIVMKPRNC

SEQ ID NO: 5 - DNA, 1671 bp, Arabidopsis thaliana
  4-coumarate-CoA ligase (4CL2), At3g21240
atgacgacacaagatgtgatagtcaatgatcagaatgatcagaaacagtgtagtaatgacgtcattttccgatcgagattgcctgatatatacatccctaaccacctcccactccacgactacatcttcgaaaatatctcagagttcgccgctaagccatgcttgatcaacggtcccaccggcgaagtatacacctacgccgatgtccacgtaacatctcggaaactcgccgccggtcttcataacctcggcgtgaagcaacacgacgttgtaatgatcctcctcccgaactctcctgaagtagtcctcactttccttgccgcctccttcatcggcgcaatcaccacctccgcgaacccgttcttcactccggcggagatttctaaacaagccaaagcctccgcggcgaaactcatcgtcactcaatcccgttacgtcgataaaatcaagaacctccaaaacgacggcgttttgatcgtcaccaccgactccgacgccatccccgaaaactgcctccgtttctccgagttaactcagtccgaagaaccacgagtggactcaataccggagaagatttcgccagaagacgtcgtggcgcttcctttctcatccggcacgacgggtctccccaaaggagtgatgctaacacacaaaggtctagtcacgagcgtggcgcagcaagtcgacggcgagaatccgaatctttacttcaacagagacgacgtgatcctctgtgtcttgcctatgttccatatatacgctctcaactccatcatgctctgtagtctcagagttggtgccacgatcttgataatgcctaagttcgaaatcactctcttgttagagcagatacaaaggtgtaaagtcacggtggctatggtcgtgccaccgatcgttttagctatcgcgaagtcgccggagacggagaagtatgatctgagctcggttaggatggttaagtctggagcagctcctcttggtaaggagcttgaagatgctattagtgctaagtttcctaacgccaagcttggtcagggctatgggatgacagaagcaggtccggtgctagcaatgtcgttagggtttgctaaagagccgtttccagtgaagtcaggagcatgtggtacggtggtgaggaacgccgagatgaagatacttgatccagacacaggagattctttgcctaggaacaaacccggcgaaatatgcatccgtggcaaccaaatcatgaaaggctatctcaatgaccccttggccacggcatcgacgatcgataaagatggttggcttcacactggagacgtcggatttatcgatgatgacgacgagcttttcattgtggatagattgaaagaactcatcaagtacaaaggatttcaagtggctccagctgagctagagtctctcctcataggtcatccagaaatcaatgatgttgctgtcgtcgccatgaaggaagaagatgctggtgaggttcctgttgcgtttgtggtgagatcgaaagattcaaatatatccgaagatgaaatcaagcaattcgtgtcaaaacaggttgtgttttataagagaatcaacaaagtgttcttcactgactctattcctaaagctccatcagggaagatattgaggaaggatctaagagcaagactagcaaatggattaatgaactag

SEQ ID NO: 6 - protein, 556 aa, Arabidopsis thaliana
  4-coumarate-CoA ligase (4CL2, At4CL2)
MTTQDVIVNDQNDQKQCSNDVIFRSRLPDIYIPNHLPLHDYIFENISEFAAKPCLINGPTGEVYTYADVHVTSRKLAAGLHNLGVKQHDVVMILLPNSPEVVLTFLAASFIGAITTSANPFFTPAEISKQAKASAAKLIVTQSRYVDKIKNLQNDGVLIVTTDSDAIPENCLRFSELTQSEEPRVDSIPEKISPEDVVALPFSSGTTGLPKGVMLTHKGLVTSVAQQVDGENPNLYFNRDDVILCVLPMFHIYALNSIMLCSLRVGATILIMPKFEITLLLEQIQRCKVTVAMVVPPIVLAIAKSPETEKYDLSSVRMVKSGAAPLGKELEDAISAKFPNAKLGQGYGMTEAGPVLAMSLGFAKEPFPVKSGACGTVVRNAEMKILDPDTGDSLPRNKPGEICIRGNQIMKGYLNDPLATASTIDKDGWLHTGDVGFIDDDDELFIVDRLKELIKYKGFQVAPAELESLLIGHPEINDVAVVAMKEEDAGEVPVAFVVRSKDSNISEDEIKQFVSKQVVFYKRINKVFFTDSIPKAPSGKILRKDLRARLANGLMN

SEQ ID NO: 7 - DNA, 1302 bp, Arabidopsis thaliana
  hydroxycinnamoyl CoA:shikimate hydroxycinnamoyl transferase (HCT), At5g48930
atgaaaattaacatcagagattccaccatggtccggcctgccaccgagacaccaatcactaatctttggaactccaacgtcgaccttgtcatccccagattccatacccctagtgtctacttctacagacccaccggcgcttccaatttctttgaccctcaggtcatgaaggaagctctttccaaagcccttgtccctttttaccctatggctggtcgcttgaagagagacgatgatggtcgtattgagatcgattgtaacggtgctggtgttctcttcgttgtggctgatactccttctgttatcgatgattttggtgattttgctcctacccttaatctccgtcagcttattcccgaagttgatcactccgctggcattcactctttcccgcttctcgttttgcaggtgactttctttaaatgtgggggagcttcacttggggttgggatgcaacatcacgcggcagatggtttctctggtcttcattttatcaacacatggtctgatatggctcgtggtcttgacctaaccattccacctttcattgatcgaacactcctccgagctagggacccgccacagcctgcttttcatcatgttgaatatcagcctgcaccaagtatgaagatacctcttgatccgtctaaatcaggacctgagaataccactgtctctatattcaaattaacacgagaccagcttgttgctcttaaggcgaaatccaaggaggatgggaacactgtcagctacagctcatacgagatgttggcagggcatgtgtggagatcagtgggaaaggcgcgagggcttccaaacgaccaagagacgaaactgtacattgcaactgatggaaggtctagactacgtccgcagctgcctcctggttactttgggaatgtgatattcactgcaacaccattggctgttgcaggggatttgttatctaagccaacatggtatgctgcaggacagattcatgatttcttggttcgtatggatgataactatctgaggtcagctcttgactacctggagatgcagcctgatctgtcagcccttgtccgcggtgcacatacctacaagtgcccaaatttgggaatcacaagctgggttagattacctatttatgatgcagactttggttggggtcgtcctatctttatgggacctggtggaattccatacgagggtttgtcttttgtgctaccaagtcctactaatgatggcagcttatccgttgccattgccctccaatctgaacacatgaaactgtttgagaagtttttgtttgagatatga

SEQ ID NO: 8 - protein, 433 aa, Arabidopsis thaliana
  hydroxycinnamoyl CoA:shikimate hydroxycinnamoyl transferase (HCT, AtHCT)
MKINIRDSTMVRPATETPITNLWNSNVDLVIPRFHTPSVYFYRPTGASNFFDPQVMKEALSKALVPFYPMAGRLKRDDDGRIEIDCNGAGVLFVVADTPSVIDDFGDFAPTLNLRQLIPEVDHSAGIHSFPLLVLQVTFFKCGGASLGVGMQHHAADGFSGLHFINTWSDMARGLDLTIPPFIDRTLLRARDPPQPAFHHVEYQPAPSMKIPLDPSKSGPENTTVSIFKLTRDQLVALKAKSKEDGNTVSYSSYEMLAGHVWRSVGKARGLPNDQETKLYIATDGRSRLRPQLPPGYFGNVIFTATPLAVAGDLLSKPTWYAAGQIHDFLVRMDDNYLRSALDYLEMQPDLSALVRGAHTYKCPNLGITSWVRLPIYDADFGWGRPIFMGPGGIPYEGLSFVLPSPTNDGSLSVAIALQSEHMKLFEKFLFEI

SEQ ID NO: 9 - DNA, 780 bp, Arabidopsis thaliana
  coumaryol shikimate 3-hydroxylase (C3H), At4g34050
atggcgacgacaacaacagaagcaacgaagacatcatcgaccaatggagaagatcagaagcagtctcagaatcttcgacatcaagaagttggtcacaagagtctcttacagagcgatgatctctaccagtatatactggagacaagtgtgtatcctagagaaccagaatcaatgaaggaactcagggaagtgacagcaaaacatccatggaacataatgaccacatcagctgatgaaggacagttcttaaacatgcttatcaagctcgttaacgccaagaacacaatggagatcggagtttacactggctactctcttctcgccaccgctcttgctctccctgaagacggcaaaattctggctatggatgtcaacagagagaattacgaattgggtttaccgatcattgagaaagccggcgttgctcacaagatcgacttcagggaaggccctgctcttcccgttcttgatgaaatcgttgctgacgagaagaaccatggaacatatgactttatattcgttgatgctgacaaagacaactacatcaactaccacaagcgtttgatcgatcttgtgaaaattggaggagtgattggctacgacaacactctgtggaatggttctgtcgtggctcctcctgatgcaccaatgaggaagtacgttcgttactacagagactttgttcttgagcttaacaaggctcttgctgctgaccctcggatcgagatctgtatgctccctgttggtgatggaatcactatctgccgtcggatcagttga

SEQ ID NO: 10 - protein, 508 aa, Arabidopsis thaliana
  coumaryol shikimate 3-hydroxylase (C3H, AtC3H)
MSWFLIAVATIAAVVSYKLIQRLRYKFPPGPSPKPIVGNLYDIKPVRFRCYYEWAQSYGPIISVWIGSILNVVVSSAELAKEVLKEHDQKLADRHRNRSTEAFSRNGQDLIWADYGPHYVKVRKVCTLELFTPKRLESLRPIREDEVTAMVESVFRDCNLPENRAKGLQLRKYLGAVAFNNITRLAFGKRFMNAEGVVDEQGLEFKAIVSNGLKLGASLSIAEHIPWLRWMFPADEKAFAEHGARRDRLTRAIMEEHTLARQKSSGAKQHFVDALLTLKDQYDLSEDTIIGLLWDMITAGMDTTAITAEWAMAEMIKNPRVQQKVQEEFDRVVGLDRILTEADFSRLPYLQCVVKESFRLHPPTPLMLPHRSNADVKIGGYDIPKGSNVHVNVWAVARDPAVWKNPFEFRPERFLEEDVDMKGHDFRLLPFGAGRRVCPGAQLGINLVTSMMSHLLHHFVWTPPQGTKPEEIDMSENPGLVTYMRTPVQAVATPRLPSDLYKRVPYDM

SEQ ID NO: 11 - DNA, 1035 bp, Arabidopsis thaliana
  cinnamoyl-CoA reductase 1 (CCR1), At1g15950
atgccagtcgacgtagcctcaccggccggaaaaaccgtctgcgtcaccggagctggtggatacatcgcttcttggattgttaagatacttctcgagagaggttacacagtcaaaggaaccgtacggaatccagatgatccgaagaacacacatttgagagaactagaaggaggaaaggagagactgattctgtgcaaagcagatcttcaggactacgaggctcttaaggcggcgattgatggttgcgacggcgtctttcacacggcttctcctgtcaccgacgatccggaacaaatggtggagccggccgtgaatggagccaagtttgtaattaatgctgcggctgaggccaaggtcaagcgcgtggtcatcacctcctccattggtgccgtctacatggacccgaaccgtgaccctgaggctgtcgttgacgaaagttgttggagtgatcttgacttctgcaaaaacaccaagaattggtattgttacggcaagatggtggcggaacaagcggcgtgggagacagcaaaggagaaaggtgttgacttggtggtgttgaatccggtgctggttcttggaccgccgttacagccgacgatcaacgccagtctttaccacgtcctcaaatatctaaccggctcggctaagacttatgctaatttgactcaagcttatgtggatgttcgcgatgtcgcgctggctcatgttctggtctatgaggcaccctcggcctccggacgttatctcctagccgagagtgctcgccaccgcggggaagttgttgagattctggctaagctattcccggagtatcctcttccgaccaagtgcaaggacgagaagaaccctagagccaagccatacaaattcactaaccagaagattaaggacttaggcttagagttcacttccaccaagcaaagcctctacgacacagtcaagagcttacaagagaaaggccatcttgctcctcctcctcctcctccttcagcatcgcaagaatccgtggaaaatggcattaagatcgggtcttga

SEQ ID NO: 12 - protein, 344 aa, Arabidopsis thaliana
  cinnamoyl-CoA reductase 1 (CCR1, AtCCR1)
MPVDVASPAGKTVCVTGAGGYIASWIVKILLERGYTVKGTVRNPDDPKNTHLRELEGGKERLILCKADLQDYEALKAAIDGCDGVFHTASPVTDDPEQMVEPAVNGAKFVINAAAEAKVKRVVITSSIGAVYMDPNRDPEAVVDESCWSDLDFCKNTKNWYCYGKMVAEQAAWETAKEKGVDLVVLNPVLVLGPPLQPTINASLYHVLKYLTGSAKTYANLTQAYVDVRDVALAHVLVYEAPSASGRYLLAESARHRGEVVEILAKLFPEYPLPTKCKDEKNPRAKPYKFTNQKIKDLGLEFTSTKQSLYDTVKSLQEKGHLAPPPPPPSASQESVENGIKIGS

SEQ ID NO: 13 - DNA, 1098 bp, Arabidopsis thaliana
  transcription factor NAC secondary wall-thickening promoting factor 1 (NST1), ANAC043
atgatgtcaaaatctatgagcatatcagtgaacggacaatctcaagtgcctcctgggtttaggtttcatccgaccgaggaagagctgttgcagtattatctccggaagaaagttaatagcatcgagatcgatcttgatgtcattcgcgacgttgatctcaacaagctcgagccttgggacattcaagagatgtgtaaaataggaacaacgccacaaaacgactggtatttctttagccacaaggacaaaaaatatccgacgggaacgagaactaacagagccactgcggctggattttggaaagcaactggccgcgacaagatcatatatagcaatggccgtagaattgggatgagaaagactcttgttttctacaaaggccgagctcctcacggccaaaaatctgattggatcatgcatgaatatagactcgatgacaacattatttcccccgaggatgtcaccgttcatgaggtcgtgagtattataggggaagcatcacaagacgaaggatgggtggtgtgtcgtattttcaagaagaagaatcttcacaaaaccctaaacagtcccgtcggaggagcttccctgagcggcggcggagatacgccgaagacgacatcatctcagatcttcaacgaggatactctcgaccaatttcttgaacttatggggagatcttgtaaagaagagctaaatcttgaccctttcatgaaactcccaaacctcgaaagccctaacagtcaggcaatcaacaactgccacgtaagctctcccgacactaatcataatatccacgtcagcaacgtggtcgacactagctttgttactagctgggcggctttagaccgcctcgtggcctcgcagcttaacggacccacatcatattcaattacagccgtcaatgagagccacgtgggccatgatcatctcgctttgccttccgtccgatctccgtaccccagcctaaaccggtccgcttcgtaccacgccggtttaacacaggaatatacaccggagatggagctatggaatacgacgacgtcgtctctatcgtcatcgcctggcccattttgtcacgtgtcgaatggtagtggataa

SEQ ID NO: 14 - protein, 365 aa, Arabidopsis thaliana
  transcription factor NAC secondary wall-thickening promoting factor 1 (NST1, AtNST1), ANAC043
MMSKSMSISVNGQSQVPPGFRFHPTEEELLQYYLRKKVNSIEIDLDVIRDVDLNKLEPWDIQEMCKIGTTPQNDWYFFSHKDKKYPTGTRTNRATAAGFWKATGRDKIIYSNGRRIGMRKTLVFYKGRAPHGQKSDWIMHEYRLDDNIISPEDVTVHEVVSIIGEASQDEGWVVCRIFKKKNLHKTLNSPVGGASLSGGGDTPKTTSSQIFNEDTLDQFLELMGRSCKEELNLDPFMKLPNLESPNSQAINNCHVSSPDTNHNIHVSNVVDTSFVTSWAALDRLVASQLNGPTSYSITAVNESHVGHDHLALPSVRSPYPSLNRSASYHAGLTQEYTPEMELWNTTTSSLSSSPGPFCHVSNGSG

SEQ ID NO: 15 - DNA, 1005 bp, Arabidopsis thaliana
  transcription factor NAC secondary wall-thickening promoting factor 2 (NST2), ANAC066, At3g61910
atgaacatatcagtaaacggacagtcacaagtacctcctggctttaggtttcacccaaccgaggaagagctcttgaagtattacctccgcaagaaaatctctaacatcaagatcgatctcgatgttattcctgacattgatctcaacaagctcgagccttgggatattcaagagatgtgtaagattggaacgacgccgcaaaacgattggtacttttatagccataaggacaagaagtatcccaccgggactagaaccaacagagccaccacggtcggattttggaaagcgacgggacgtgacaagaccatatataccaatggtgatagaatcgggatgcgaaagacgcttgtcttctacaaaggtcgagcccctcatggtcagaaatccgattggatcatgcacgaatatagactcgacgagagtgtattaatctcctcgtgtggcgatcatgacgtcaacgtagaaacgtgtgatgtcataggaagtgacgaaggatgggtggtgtgtcgtgttttcaagaaaaataacctttgcaaaaacatgattagtagtagcccggcgagttcggtgaaaacgccgtcgttcaatgaggagactatcgagcaacttctcgaagttatggggcaatcttgtaaaggagagatagttttagaccctttcttaaaactccctaacctcgaatgccataacaacaccaccatcacgagttatcagtggttaatcgacgaccaagtcaacaactgccacgtcagcaaagttatggatcccagcttcatcactagctgggccgctttggatcggctcgttgcctcacagttaaatgggcccaactcgtattcaataccagccgttaatgagacttcacaatcaccgtatcatggactgaaccggtccggttgtaataccggtttaacaccagattactatataccggagattgatttatggaacgaggcagatttcgcgagaacgacatgccacttgttgaacggtagtggataa

SEQ ID NO: 16 - protein, 334 aa, Arabidopsis thaliana
  transcription factor NAC secondary wall-thickening promoting factor 2 (NST2), ANAC066
MNISVNGQSQVPPGFRFHPTEEELLKYYLRKKISNIKIDLDVIPDIDLNKLEPWDIQEMCKIGTTPQNDWYFYSHKDKKYPTGTRTNRATTVGFWKATGRDKTIYTNGDRIGMRKTLVFYKGRAPHGQKSDWIMHEYRLDESVLISSCGDHDVNVETCDVIGSDEGWVVCRVFKKNNLCKNMISSSPASSVKTPSFNEETIEQLLEVMGQSCKGEIVLDPFLKLPNLECHNNTTITSYQWLIDDQVNNCHVSKVMDPSFITSWAALDRLVASQLNGPNSYSIPAVNETSQSPYHGLNRSGCNTGLTPDYYIPEIDLWNEADFARTTCHLLNGSG

SEQ ID NO: 17 - DNA, 1077 bp, Arabidopsis thaliana
  transcription factor NAC secondary wall-thickening promoting factor 3 (NST3), SND1/ANAC012, At1g32770
atggctgataataaggtcaatctttcgattaatggacaatcaaaagtgcctccaggtttcagattccatcccaccgaagaagaacttctccattactatctccgtaagaaagttaactctcaaaagatcgatcttgatgtcattcgtgaagttgatctaaacaagcttgagccttgggatattcaagaggaatgtagaatcggttcaacgccacaaaacgactggtacttcttcagccacaaggacaagaagtatccaaccgggaccaggacgaaccgggcaacagtcgctggattctggaaagctaccggacgtgacaaaatcatctgcagttgtgtccggagaattggactgaggaagacactcgtgttctacaaaggaagagctcctcacggtcagaaatccgactggatcatgcatgagtatcgcctcgacgatactccaatgtctaatggctatgctgatgttgttacagaagatccaatgagctataacgaagaaggttgggtggtatgtcgagtgttcaggaagaagaactatcaaaagattgacgattgtcctaaaatcactctatcttctttacctgatgacacggaggaagagaaggggcccacctttcacaacactcaaaacgttaccggtttagaccatgttcttctctacatggaccgtaccggttctaacatttgcatgcccgagagccaaacaacgactcaacatcaagatgatgtcttattcatgcaactcccaagtcttgagacacctaaatccgagagcccggtcgaccaaagtttcctgactccaagcaaactcgatttctctcccgttcaagagaagataaccgaaagaccggtttgcagcaactgggctagtcttgaccggctcgtagcttggcaattgaacaatggtcatcataatccgtgtcatcgtaagagttttgatgaagaagaagaaaatggtgatactatgatgcagcgatgggatcttcattggaataatgatgataatgttgatctttggagtagtttcactgagtcttcttcgtctttagacccacttcttcatttatctgtatga

SEQ ID NO: 18 - protein, 358 aa, Arabidopsis thaliana
  transcription factor NAC secondary wall-thickening promoting factor 3 (NST3), SND1/ANAC012
MADNKVNLSINGQSKVPPGFRFHPTEEELLHYYLRKKVNSQKIDLDVIREVDLNKLEPWDIQEECRIGSTPQNDWYFFSHKDKKYPTGTRTNRATVAGFWKATGRDKIICSCVRRIGLRKTLVFYKGRAPHGQKSDWIMHEYRLDDTPMSNGYADVVTEDPMSYNEEGWVVCRVFRKKNYQKIDDCPKITLSSLPDDTEEEKGPTFHNTQNVTGLDHVLLYMDRTGSNICMPESQTTTQHQDDVLFMQLPSLETPKSESPVDQSFLTPSKLDFSPVQEKITERPVCSNWASLDRLVAWQLNNGHHNPCHRKSFDEEEENGDTMMQRWDLHWNNDDNVDLWSSFTESSSSLDPLLHLSV

SEQ ID NO: 19 - DNA, 918 bp, Arabidopsis thaliana
  secondary wall-associated NAC domain protein 2 (SND2), ANAC073, At4g28500
atgacttggtgcaatgaccgtagcgatgttcagaccgttgaaagaatcattccctccccgggggcggctgagtcccccgtagcctcacttccggtctcttgtcacaaaacttgcccttcttgtggccataacttcaagtttcacgaacaggctgggatccatgacttgccgggacttcctgctggagtaaaatttgatccgacggatcaagaggtcttggagcatcttgaaggcaaggtaagagatgacgcaaaaaagcttcatcctctcattgatgagtttatccgtaccatcgatggtgaaaacggcatttgttatacccatcctgaaaaattgccaggagtgaacaaggacgggacggtgcgtcatttcttccaccgaccgtcgaaggcatacacgacgggaacaagaaagcgacgtaaagtccacactgattctgacgtcggtggagagacacggtggcacaagacaggaaaaacacggccagttcttgctggaggaagagtgagaggctacaagaaaatcctagtgctctacacaaactacggcaaacaaaaaaaacccgagaagactaattgggtaatgcatcaatatcatcttggcactagcgaggaagagaaagaaggtgagctcgtcgtctccaaagtcttttaccagactcaaccacgtcaatgcggtggctccgttgctgctgcagccaccgctaaggaccgaccttacctccacggcctcggtggaggtggtggccgccaccttcattaccatcttcatcataacaacggtaacggtaagagcaacggcagtgggggaaccgccggagccggtgagtattatcacaatattccggctattatctcgttcaatcagaccgggatacagaaccacttggttcatgactctcaaccttttatcccttaa

SEQ ID NO: 20 - protein, 305 aa, Arabidopsis thaliana
  secondary wall-associated NAC domain protein 2 (SND2), ANAC073
MTWCNDRSDVQTVERIIPSPGAAESPVASLPVSCHKTCPSCGHNFKFHEQAGIHDLPGLPAGVKFDPTDQEVLEHLEGKVRDDAKKLHPLIDEFIRTIDGENGICYTHPEKLPGVNKDGTVRHFFHRPSKAYTTGTRKRRKVHTDSDVGGETRWHKTGKTRPVLAGGRVRGYKKILVLYTNYGKQKKPEKTNWVMHQYHLGTSEEEKEGELVVSKVFYQTQPRQCGGSVAAAATAKDRPYLHGLGGGGGRHLHYHLHHNNGNGKSNGSGGTAGAGEYYHNIPAIISFNQTGIQNHLVHDSQPFIP

SEQ ID NO: 21 - DNA, 945 bp, Arabidopsis thaliana
  secondary wall-associated NAC domain protein 3 (SND3), ANAC010, At1g28470
atgagttggtgtgatggttcagatgataactacgatcttaatcttgaaagagtatcgaacactgatcatccatcggttcaactcaaagaccaatctcaatcatgtgtaacgagccgtccagattccaagattagcgctgaaactcccatcacgacttgtccttcttgcggacacaagctccatcatcaccaagacgaccaggttggtagcatcaaagatttaccaagcttaccggcaggagtcaaattcgatccgtcggataaagagatccttatgcatttggaggcgaaggtatcatccgataagcgaaaacttcatccgttgattgatgaatttatacctacgcttgaaggagagaatggaatttgttatacgcatcctgagaaacttcctggagtaagcaaggacgggcaagtacggcacttcttccaccggccatcaaaggcttatacgaccggaacacgaaaacgaagaaaagtgagcacagatgaggaaggccatgaaacaaggtggcacaaaacaggcaagactcgacctgttttgtctcaatcaggagaaaccggtttcaagaagatcctagtgctctacaccaactatggtcgccagaagaagcctgagaagacgaattgggtgatgcatcagtatcatttaggtagcagcgaggacgaaaaagacggtgaaccagtcctctctaaagtcttctaccaaacacagcctaggcaatgcggttcgatggaacctaaaccgaaaaatctcgtaaacctaaaccggtttagttatgaaaatattcaggccggtttcgggtatgagcatggtggtaaaagtgaagagacgacgcaggtgattcgagagttggtagttcgtgaaggcgatgggtcatgttcgtttcttagttttacttgtgatgcaagtaagggtaaagaaagcttcatgaagaatcaatag

SEQ ID NO: 22 - protein, 314 aa, Arabidopsis thaliana
  secondary wall-associated NAC domain protein 3 (SND3), ANAC010
MSWCDGSDDNYDLNLERVSNTDHPSVQLKDQSQSCVTSRPDSKISAETPITTCPSCGHKLHHHQDDQVGSIKDLPSLPAGVKFDPSDKEILMHLEAKVSSDKRKLHPLIDEFIPTLEGENGICYTHPEKLPGVSKDGQVRHFFHRPSKAYTTGTRKRRKVSTDEEGHETRWHKTGKTRPVLSQSGETGFKKILVLYTNYGRQKKPEKTNWVMHQYHLGSSEDEKDGEPVLSKVFYQTQPRQCGSMEPKPKNLVNLNRFSYENIQAGFGYEHGGKSEETTQVIRELVVREGDGSCSFLSFTCDASKGKESFMKNQ

SEQ ID NO: 23 - DNA, 1113 bp, Arabidopsis thaliana
  MYB domain protein 103 (MYB103), At1g63910
atgggtcatcactcatgctgcaaccagcaaaaggtgaagagagggctttggtcaccggaagaagatgagaagcttattagatatatcacaactcatggctatggatgttggagtgaagtccctgaaaaagcagggcttcaaagatgtggaaaaagttgtagattgcgatggataaactatcttcgacctgatatcaggagaggaaggttctctccagaagaagagaaattgatcataagccttcatggagttgtgggaaacaggtgggctcatatagctagtcatttaccgggaagaacagataacgagattaaaaactattggaattcatggattaagaaaaagatacgaaaaccgcaccatcattacagtcgtcatcaaccgtcagtaactactgtgacattgaatgcggacactacatcgattgccactaccatcgaggcctctaccaccacaacatcgactatcgataacttacattttgacggtttcactgattctcctaaccaattaaatttcaccaatgatcaagaaactaatataaagattcaagaaacttttttctcccataaacctcctctcttcatggtagacacaacacttcctatcctagaaggaatgttctctgaaaacatcatcacaaacaataacaagaacaatgatcatgatgacacgcaaagaggaggaagagaaaatgtttgtgaacaagcatttctaacaactaacacggaagaatgggatatgaatcttcgtcagcaagagccgtttcaagttcctacactggcgtcacatgtgttcaacaactcttccaattcaaatattgacacggttataagttataatctaccggcgctaatagagggaaatgtcgataacatcgtccataatgaaaacagcaatgtccaagatggagaaatggcgtccacattcgaatgtttaaagaggcaagaactaagctatgatcaatgggacgattcacaacaatgctctaactttttcttttgggacaaccttaatataaacgtggaaggttcatctcttgttggaaaccaagacccatcaatgaatttgggatcatctgccttatcttcttctttcccttcttcgttttaa

SEQ ID NO: 24 - protein, 370 aa, Arabidopsis thaliana
  MYB domain protein 103 (MYB103)
MGHHSCCNQQKVKRGLWSPEEDEKLIRYITTHGYGCWSEVPEKAGLQRCGKSCRLRWINYLRPDIRRGRFSPEEEKLIISLHGVVGNRWAHIASHLPGRTDNEIKNYWNSWIKKKIRKPHHHYSRHQPSVTTVTLNADTTSIATTIEASTTTTSTIDNLHFDGFTDSPNQLNFTNDQETNIKIQETFFSHKPPLFMVDTTLPILEGMFSENIITNNNKNNDHDDTQRGGRENVCEQAFLTTNTEEWDMNLRQQEPFQVPTLASHVFNNSSNSNIDTVISYNLPALIEGNVDNIVHNENSNVQDGEMASTFECLKRQELSYDQWDDSQQCSNFFFWDNLNINVEGSSLVGNQDPSMNLGSSALSSSFPSSF

SEQ ID NO: 25 - DNA, 801 bp, Arabidopsis thaliana
  MYB domain protein 85 (MYB85), At4g22680
atggggagacagccatgctgtgacaagctaggggtgaagaaagggccgtggacggtggaggaagataagaagcttataaacttcatactaaccaatggccattgttgctggcgtgctttgccgaagctggccggtctccgtcgctgtggaaagagctgccgcctccggtggactaactatctccggcctgacttaaaacgaggccttctctcgcatgatgaagaacaacttgtcatagatcttcatgctaatctcggcaataagtggtctaagatagcttcaagattacctggaagaacagataacgaaataaaaaaccattggaatactcatatcaagaagaaacttcttaagatgggaatcgatcctatgacccatcaacccctaaatcaagaaccttctaatatcgataattccaaaaccattccgtccaatccagacgatgtctcagtggaaccaaagacaactaacacgaaatacgtggagataagtgtcacgacaacagaagaagaaagtagtagcacggttactgatcaaaacagttcgatggataatgaaaatcatctaattgacaacatttatgatgatgatgaattgtttagttacttatggtccgacgaaactactaaagatgaggcctcttggagtgatagtaactttggtgttggtggaacattatatgaccacaatatctccggcgccgatgcagattttccgatatggtcaccggaaagaatcaatgacgagaagatgtttttggattattgtcaagactttggtgttcatgattttgggttttga

SEQ ID NO: 26 - protein, 266 aa, Arabidopsis thaliana
  MYB domain protein 85 (MYB85)
MGRQPCCDKLGVKKGPWTVEEDKKLINFILTNGHCCWRALPKLAGLRRCGKSCRLRWTNYLRPDLKRGLLSHDEEQLVIDLHANLGNKWSKIASRLPGRTDNEIKNHWNTHIKKKLLKMGIDPMTHQPLNQEPSNIDNSKTIPSNPDDVSVEPKTTNTKYVEISVTTTEEESSSTVTDQNSSMDNENHLIDNIYDDDELFSYLWSDETTKDEASWSDSNFGVGGTLYDHNISGADADFPIWSPERINDEKMFLDYCQDFGVHDFGF

SEQ ID NO: 27 - DNA, 843 bp, Arabidopsis thaliana
  MYB domain protein 46 (MYB46), At5g12870
atgaggaagccagaggtagccattgcagctagtactcaccaagtaaagaagatgaagaagggactttggtctcctgaggaagactcaaagctgatgcaatacatgttaagcaatggacaaggatgttggagtgatgttgcgaaaaacgcaggacttcaaagatgtggcaaaagctgccgtcttcgttggatcaactatcttcgtcctgacctcaagcgtggcgctttctctcctcaagaagaggatctcatcattcgctttcattccatcctcggcaacaggtggtctcagattgcagcacgattgcctggtcggaccgataacgagatcaagaatttctggaactcaacaataaagaaaaggctaaagaagatgtccgatacctccaacttaatcaacaactcatcctcatcacccaacacagcaagcgattcctcttctaattccgcatcttctttggatattaaagacattataggaagcttcatgtccttacaagaacaaggcttcgtcaacccttccttgacccacatacaaaccaacaatccatttccaacgggaaacatgatcagccacccgtgcaatgacgattttaccccttatgtagatggtatctatggagtaaacgcaggggtacaaggggaactctacttcccacctttggaatgtgaagaaggtgattggtacaatgcaaatataaacaaccacttagacgagttgaacactaatggatccggaaacgcacctgagggtatgagaccagtggaagaattttgggaccttgaccagttgatgaacactgaggttccttcgttttacttcaacttcaaacaaagcatatga

SEQ ID NO: 28 - protein, 280 aa, Arabidopsis thaliana
  MYB domain protein 46 (MYB46)
MRKPEVAIAASTHQVKKMKKGLWSPEEDSKLMQYMLSNGQGCWSDVAKNAGLQRCGKSCRLRWINYLRPDLKRGAFSPQEEDLIIRFHSILGNRWSQIAARLPGRTDNEIKNFWNSTIKKRLKKMSDTSNLINNSSSSPNTASDSSSNSASSLDIKDIIGSFMSLQEQGFVNPSLTHIQTNNPFPTGNMISHPCNDDFTPYVDGIYGVNAGVQGELYFPPLECEEGDWYNANINNHLDELNTNGSGNAPEGMRPVEEFWDLDQLMNTEVPSFYFNFKQSI

SEQ ID NO: 29 - DNA, 1032 bp, Arabidopsis thaliana
  MYB domain protein 83 (MYB83), At3g08500
atgatgatgaggaaaccggacattactacgatcagagacaaaggcaagccaaatcatgcatgtggtggtaataacaacaaaccgaagctaagaaaaggactttggtcgcctgatgaagatgagaagctgataagatacatgttgactaatggacaaggatgttggagtgacatcgctagaaatgctggtcttttacgttgtggtaaaagttgtcgccttcgctggatcaattacttgaggcctgatcttaaacgtggatccttctctcctcaggaggaggatctcatcttccatttgcattccattcttggtaacaggtggtctcaaatagctactcggcttccaggtagaacagacaacgagatcaaaaacttttggaactcgacattgaagaagcggcttaagaacaacagcaacaacaatacttcatcaggatcatcacctaacaatagtaatagtaattccttggacccaagagatcaacatgtggatatgggaggcaactcaacttcattgatggatgactatcatcatgatgaaaacatgatgacagtggggaacaccatgcgcatggactcttcctccccattcaatgttggaccaatggttaatagtgtgggcttaaaccaactttatgatcccttgatgatatcagtgccggataacggatatcaccaaatgggaaacacagtgaatgtgttcagcgttaatggtttaggagattatggaaacacaattcttgatccaattagcaagagagtatcagtagaaggtgatgattggttcattcccccctcggagaataccaacgtcattgcttgtagtacaagcaacaacctaaacttacaggcccttgatccttgcttcaatagcaaaaatctttgtcattcagaaagcttcaaggtagggaatgtgttggggatagagaatggttcttgggaaatagaaaaccctaaaatcggagattgggatttggatggtctcatcgataacaactcttcttttcccttccttgatttccaagtcgattga

SEQ ID NO: 30 - protein, 343 aa, Arabidopsis thaliana
  MYB domain protein 83 (MYB83)
MMMRKPDITTIRDKGKPNHACGGNNNKPKLRKGLWSPDEDEKLIRYMLTNGQGCWSDIARNAGLLRCGKSCRLRWINYLRPDLKRGSFSPQEEDLIFHLHSILGNRWSQIATRLPGRTDNEIKNFWNSTLKKRLKNNSNNNTSSGSSPNNSNSNSLDPRDQHVDMGGNSTSLMDDYHHDENMMTVGNTMRMDSSSPFNVGPMVNSVGLNQLYDPLMISVPDNGYHQMGNTVNVFSVNGLGDYGNTILDPISKRVSVEGDDWFIPPSENTNVIACSTSNNLNLQALDPCFNSKNLCHSESFKVGNVLGIENGSWEIENPKIGDWDLDGLIDNNSSFPFLDFQVD

SEQ ID NO: 31 - DNA, 825 bp, Arabidopsis thaliana
  MYB domain protein 58 (MYB58), At1g16490
atgggcaaaggaagagcaccatgttgtgacaaaaccaaagtgaagagaggaccatggagccatgatgaagacttgaaactcatctctttcattcacaagaatggtcatgagaattggagatctctcccaaagcaagctggattgttgaggtgtggcaagagttgtcgtctgcgatggattaattacctcagacctgatgtgaaacgtggcaatttcagtgcagaggaagaagacaccatcatcaaacttcaccagagctttggtaacaagtggtcgaagattgcttctaagctgcctggaagaacagacaatgagatcaagaatgtgtggcatacacatctcaagaaaagattgagctcggaaactaaccttaatgccgatgaagcgggttcaaaaggttctttgaatgaagaagagaactctcaagagtcatctccaaatgcttcaatgtcttttgctggttccaacatttcaagcaaagacgatgatgcacagataagtcaaatgtttgagcacattctaacttatagcgagtttacggggatgttacaagaggtagacaaaccagagctgctggagatgccttttgatttagatcctgacatttggagtttcatagatggttcagactcattccaacaaccagagaacagagctcttcaagagtctgaagaagatgaagttgataaatggtttaagcacctggaaagcgaactcgggttagaagaaaacgataaccaacaacaacaacaacagcataaacagggaacagaagatgaacattcatcatcactcttggagagttacgagctcctcatacattaa

SEQ ID NO: 32 - protein, 274 aa, Arabidopsis thaliana
  MYB domain protein 58 (MYB58)
MGKGRAPCCDKTKVKRGPWSHDEDLKLISFIHKNGHENWRSLPKQAGLLRCGKSCRLRWINYLRPDVKRGNFSAEEEDTIIKLHQSFGNKWSKIASKLPGRTDNEIKNVWHTHLKKRLSSETNLNADEAGSKGSLNEEENSQESSPNASMSFAGSNISSKDDDAQISQMFEHILTYSEFTGMLQEVDKPELLEMPFDLDPDIWSFIDGSDSFQQPENRALQESEEDEVDKWFKHLESELGLEENDNQQQQQQHKQGTEDEHSSSLLESYELLIH

SEQ ID NO: 33 - DNA, 885 bp, Arabidopsis thaliana
  MYB domain protein 63 (MYB63), At1g79180
atggggaagggaagagcaccttgttgtgacaagaccaaagtgaagagaggtccatggagcccagaagaagacattaaactcatctctttcattcaaaagtttggtcatgagaactggagatctctccccaaacaatctgggctattgaggtgtgggaagagttgtcgtctaaggtggattaactatcttaggccagatctgaagcgtggcaacttcacttcagaggaggaagaaacaatcattaagcttcaccacaactatgggaacaagtggtcgaaaatcgcttctcaacttccaggtagaacagataacgagatcaagaatgtgtggcacactcatctaaagaaaagactggctcagagctcaggaactgcagatgaaccggcctcgccttgttcgagtgattctgtttctcgtgggaaagatgataagtcatctcacgtagaagattctttgaacagagagactaatcataggaatgagttgtctacatctatgtcttctgggggttccaaccaacaagatgatccaaagatagacgaactcaggtttgagtatatagaagaagcttatagcgagtttaacgacattattattcaagaggtagacaaacccgatctgctggagataccatttgattcagatcctgacatttggagtttcttagatacttcaaactcatttcaacaatccactgcaaatgagaacagctcaggctcaagagcaacaacagaagaagagtctgatgaggatgaggttaagaaatggttcaagcacctagaaagcgaactcgggttagaagaagacgataatcaacaacaatacaaagaagaagaatcatcatcatcatcactcttgaagaactacgagctcatgatacattga

SEQ ID NO: 34 - protein, 294 aa, Arabidopsis thaliana
  MYB domain protein 63 (MYB63)
MGKGRAPCCDKTKVKRGPWSPEEDIKLISFIQKFGHENWRSLPKQSGLLRCGKSCRLRWINYLRPDLKRGNFTSEEEETIIKLHHNYGNKWSKIASQLPGRTDNEIKNVWHTHLKKRLAQSSGTADEPASPCSSDSVSRGKDDKSSHVEDSLNRETNHRNELSTSMSSGGSNQQDDPKIDELRFEYIEEAYSEFNDIIIQEVDKPDLLEIPFDSDPDIWSFLDTSNSFQQSTANENSSGSRATTEEESDEDEVKKWFKHLESELGLEEDDNQQQYKEEESSSSSLLKNYELMIH

SEQ ID NO: 35 - DNA, 1577 bp, Arabidopsis thaliana
  promoter (1)...(1577): xylan biosynthesis enzyme irregular xylem 8 (IRX8) (GAUT12) tissue-specific secondary wall promoter
acgagctgacttgtaccgatgagctggctcttctgggcgagctggctgatcttgacgagcagacttctcccgacgagctgacttgtgtcgatgagctggctcttctgggcgagttggctgatcttgacgagcagacttctcccgacgagctgacttgtgtcgatgagctggctcttctgggcgaactggctgatcttgacgagcagacttctcccgacgagctgacttgtgctatcctttctccaggtctcgaaaaagtcccctttcccgagactttctattccttatttatacccgtccgtatagtagggtacgcaaggtgaattctcgagagtgccccttttctacgcagccgaactcacatcctgaccaggccgggcttcggcctggtgggccggctcgagttctaaagtgatggtcggggctgggtcgttattccttgaaatgggccggttgatcactgaggcccaattgatgtatcaacatgtggtttttataaaaagagtcgtgagaagagttttctctaaaaatcccttgtgtttggtaatcaaacttcattcaaccaacgaattccaaaaaaacaactaaattgttcgggtatataaaatgattggtaatgatatatcccatagaggccgtagacataggcccaaaaagtttccataactagcagaaattgaaacttgcaagttgcaaatattattacactggaaaggcaacaagtcttgaagtacaaactacaaagacttcttgtttggatggggacgactgacgagtttgaataacttaagagaaaagggtcgcaatcgaaattagacaagaaattagtcctcaaaaagtaaattctgaagttgaagctccaatgtctttgttcaaagactttatttagatgtaaagttatgtcttgtaaccaccaaacagctccttttcatctacactcccaatttttttaacatctatgttttgcattgcctttgacttgtctttctctctccaacttctctccttcaacataaagccaaatcctaaatccaaatcccttaaaccgaaccgaattaaaccgaagctgttgaactatcgcaaaatttcagatcttactaatcataaacatgtgacgtttaattcattttaagagtttcatgatttgcactgaatggtattccgagtccaccggaaaaaaacttttcctacaagtagaaaaaggataaccccataaatccaaataacctaaccgatcaaacatataccaatataaaccaaaacaagattcagattcatcggtttagtaatcgaagtaatgtactaatgtgtaatattgattccaccaccagcttagagattcgaaccaaaaaccgaatagcgcataaccgagaaaacccaaagcttcctaacaaatacataaaaccgtggtgtttctaattctaaccaacacacgtttcctttttattcacaagaaacatcagagttatgatctgccattaataacctaaacacaaagcaaggttaggtaaatgatatggacccctaatgaataatcatacaatacataacaacgtaagatccagtttccctcttcg

SEQ ID NO: 36 - DNA, 2619 bp, Arabidopsis thaliana
  promoter (1)...(2619): vascular-related NAC-domain protein 6 (VND6) vessel-specific promoter
cgccaaaaagatgttatgatgtgatgcattctttaatatagattaaactattggtgatttgtttttctatagttaatcactagcaagaacatttttcttttatgtttacagtttttagattataaaaaaatggtgtaataagaacatgtcaaatcaaatgtatttaatttgttaatatagatttgtgtataaacaattggtagttttgataattcaatttttcagcaatcatcataataatactttacaagaaaagctaaatcatctgaaaattttatatgaatacgtacggtttaattcccaatctacaacttttttagttggatttattataaccgtttttctaaaacaaaacacattaaaatttataagtgaagatccaatgggttcaaaccttttaattctcaataaatatacatagattctcgaagatatcctatcaacttgtaaaagttgtttaatcaatcttttgtttgatgaaatcttgttcaactgttgatttggttaagttttatagctgaaatgtgtataagtgtttctgaacctttttaattactgctaaatcaatttatgtcttacaaacttgccgatgtatcatgtatgttcattaggggtgtcaaaatgagccagctcgctcagctcagctcatgatgaacttaaatcttttatgagccagctcagctcaactcatttattatatgagcttcaaaatacaaactcggactcagatcatctagatcacgagctaaatgaggtagttcgcgagctaatgcaaataaatgaaaaaatttaaattttctaaaatttttatgtaaattatatatttttaaaaatatatttctatttttatagattatataaatatttatgttttgattgttgactttttgtgtttattactaatatttattttcagaaattattatgtaacttatatattttctaaaatatatttctattatttatagaaaaatatatatatactttgattgttagttttttgtatatattacttcaaaaaagccaaactcatgagctagctcatgttcattaaagctcgctcatataactcgtgagctaaataaagttcgatcactaaactcatttattaaatgatcctaaaaaatagaattcgcgctcatgaataactgagtcgagttgagccagctcatgagctatcagctcattttgacaccattaatgttcatataataatcgtaatccatcatgaccaattaggcaattaagacatactataacaaaacatttttttttttttcgtcaaacattgttttgttaaaggtttcaaaaagaacatgcgtatcaatttcaccaaacgaatctaataaatagcacgaccatcggatattatattgctatttgacgatcaacgtacgttcgattaaaaaaagtacggggattgtttagtttaatccaagtgtagtgttatttagacttcgagtaacatcaacgcgggagaagaaacgcatgggatgaatgtgtaaagtggttaactttcaacaatgtttcttaattgctaagatgtttaaaacgagtttacatgaattcttgtgttacttatcgaattatcttttatgagataattagtacactaccttattagggctccatttctttttctatctaggcctaggtcgatcagtactgtgtatgttacacatatgatattaaaaaaaaaattgattctataataatcttcataactaaaggcaagtatagtttatttgaaaacgtctcattcaatagttggtagagatagttctaaaagatcacattacttctctatcacacagagtgtagaaaagtgaaaacttatgcaacacttcaggtagaaagagaaaagacagtgatagcttagttataattaaagacccccaaaatccaaatagaatcttctcttaaataaactattgaaaaaatattcacaaaaaaataaaaagcacatttccttttgcttgcatcacgagagcttttgtctctctttacatttatgtgcctatatataagcctagagaatccaccatcatcggagtactcgttgtctttcatgatctcaacataaacaagacaaaacgcttttgtctcttgtctatctaaattaaatctacgaggaaacgaagagaagcaacaaaattcgatattttagaagtcttgcataaataagaagaaggtttcaagtaagtttctttcagtacatagagaaaccatgtatatgatttatgattgtcaagatgttacacagtcgtatatataattataagtatttcataaaagtaatttatgaaaccatgcacataactaacttttgtttttgattttgtaaattgagtagtttttgtttttattatcatttttatgtgtttatagttggttcagccgagatattatgagtaaccaaacgtaacctttttcataatgaaacggatcaaatatactttaatctttttcctacatatgcttagttacttgaaaacttgatttcacattacttctatgcatatcttttctatgtaccgcgcgatgataaagtatgtgttacaaattgccacattgcagaaaatataaaattaaaaagatcaaatggaaagtctcgcacac

SEQ ID NO: 37 - protein, 199 aa, Arabidopsis thaliana
  transcription factor shine (SHN1, WIN1), AtSHN1, At1g15360
MVQTKKFRGVRQRHWGSWVAEIRHPLLKRRIWLGTFETAEEAARAYDEAAVLMSGRNAKTNFPLNNNNTGETSEGKTDISASSTMSSSTSSSSLSSILSAKLRKCCKSPSPSLTCLRLDTASSHIGVWQKRAGSKSDSSWVMTVELGPASSSQETTSKASQDAILAPTTEVEIGGSREEVLDEEEKVALQMIEELLNTN

SEQ ID NO: 38 - protein, 189 aa, Arabidopsis thaliana
  transcription factor shine (SHN2), AtSHN2, At5g11190
MVHSRKFRGVRQRQWGSWVSEIRHPLLKRRVWLGTFETAEAAARAYDQAALLMNGQNAKTNFPVVKSEEGSDHVKDVNSPLMSPKSLSELLNAKLRKSCKDLTPSLTCLRLDTDSSHIGVWQKRAGSKTSPTWVMRLELGNVVNESAVDLGLTTMNKQNVEKEEEEEEAIISDEDQLAMEMIEELLNWS

SEQ ID NO: 39 - protein, 189 aa, Arabidopsis thaliana
  transcription factor shine (SHN3), AtSHN3, At5g25390
MVHSKKFRGVRQRQWGSWVSEIRHPLLKRRVWLGTFDTAETAARAYDQAAVLMNGQSAKTNFPVIKSNGSNSLEINSALRSPKSLSELLNAKLRKNCKDQTPYLTCLRLDNDSSHIGVWQKRAGSKTSPNWVKLVELGDKVNARPGGDIETNKMKVRNEDVQEDDQMAMQMIEELLNWTCPGSGSIAQV

SEQ ID NO: 40 - protein, 206 aa, Populus trichocarpa
  transcription factor shine (SHN1), PtSHN1
MVQSKKFRGVRQRHWGSWVSEIRHPLLKRRVWLGTFETAEEAARAYDQAAILMSGRNAKTNFPIPQTSNEEDPKSSDEASLPTPPNGLSEILHAKLRKCSKAPSPSMTCLRLDTENSLIGVWQKRAGERSDSNWVMRVQLGQRESQVSESTLPLPQSSGGVSEPELRAEMGEDERIALQMIEELLNRNCPSPSFGVQDHGDGSLFL

SEQ ID NO: 41 - protein, 208 aa, Populus trichocarpa
  transcription factor shine (SHN2), PtSHN2
MVPSKKFRGVRQRRWGSWVSEIRHPLVKRRVWLGTFETAEEAARAYDQAAILMSGRNAKTNFPMPQTSNEDDPKSSDHQPSLTTPPNGLSQILHAKLRKCSKAPSPSMTCLRLDAENSIGVWQQRAGQRSDSNWVMTVQLGKRDESQVSESALPLPDQSPGGISGPEWREEMDKEERVALQMVEELLNRNCPSPPFGVQDHDDDSFFL

SEQ ID NO: 42 - protein, 179 aa, Populus trichocarpa
  transcription factor shine (SHN3), PtSHN3
MVQSKKFRGVRQRHWGSWVSEIRHPLLKRRVWLGTFDTAEEAARAYDEAAILMSGRNAKTNFPVVANQTRNGQNSPSSSSALSAKLRKYCRSPYPSLTCLRLDAENCHIGVWQKRAGPRSVSNWIMTVELGKKDGRQAPEQKILISDTSDMAGQEGGSDDGPDDEERVALQMIEELLNR

SEQ ID NO: 43 - protein, 178 aa, Populus trichocarpa
  transcription factor shine (SHN4), PtSHN4
MVQSKKFRGVRQRQWGSWVSEIRHPLLKRRVWLGTFETAEAAARAYDQAAILMNGQNAKTNFPTSHLDQDTNLGKDNNSPLPAKALAELLNSKLRKCCGKDPSPSLTCLRLDNDNSHIGVWQKKAGSRSSSNWVMKVELGNYNKKTESSPTVEIEPENGTEEEDRIAMQMIEELLNRN

SEQ ID NO: 44 - protein, 192 aa, Populus trichocarpa
  transcription factor shine (SHN5), PtSHN5
MVQSKKFRGVRQRQWGSWVSEIRHPLLKRRVWLGTFETAEAAARAYDQAAILMNGQNAKTNFPASHLDQDTKLGKDNNSPLPAKALAELLYSKLRKCCGKDPSPSLTCLRLDNDNSHIGVWQKKAGSCSSSNWVMRVELGNSNRKSTQVMEELRPSLSSESSSRVEIEPEINGTDEEDKIAMQMIDELLNCN

SEQ ID NO: 45 - protein, 214 aa, Medicago truncatula
  transcription factor shine (SHN1), MtSHN1
MVQSKKFRGVRQRHWGSWVSEIRHPLLKRRVWLGTFETAEEAARAYDQAAILMSGRNAKTNFPITQTSEGDPKSITSNENKPSTSKDLEEILHAKLRKCSKVPSPSMTCLRLDTENSHIGVWQKRAGKCSESNWVMTVQLGKKMSVTQDSGSSSSSVAPSSAVATEEEIVRGEIDEEDRIALQMIEELLNDKNCPSPSINNIKQGDDIDNSFFL

SEQ ID NO: 46 - protein, 175 aa, Medicago truncatula
  transcription factor shine (SHN2), MtSHN2
MVHSKKFRGVRQRHWGSWVSEIRHPLLKRRVWLGTFETAEEAAKAYDEAAILMSGRNAKTNFPINVENQTNSISSSSTSSKAFSAVLSAKLRKCCKFPSPSLTCLRLDAENSHIGVWQKGAGPRSESNWIMMVELERKKSASVPEKAKPEELSKNGLDDEQKIALQMIEELLNRN

SEQ ID NO: 47 - protein, 196 aa, Medicago truncatula
  transcription factor shine (SHN3), MtSHN3
MVKSKKFRGVRQRHWGSWVSEIRHPLLKRRVWLGTFETAEEAARAYDEAAILMTNSNNKTFATSSSTSTKPNTSLSAILSAKLRKCCKSPSPSLTCLRLDTENSHFGVWQKRAGPRSDSSWIMMVELERKKKEQEEESEVLPNSDSETLASVVDNEDSEKAVKPENEDEEGNDKNKGLDEEQRIALQMIEELLNRN

SEQ ID NO: 48 - protein, 208 aa, Medicago truncatula
  transcription factor shine (SHN4), MtSHN4
MVQQTKKFRGVRQRQWGSWVSEIRHPLLKRRVWLGTFETAEAAARAYDQAAILMNGQSAKTNFPVTKNQGEEVASDTPYNGGGGDDSFLSPKALSELLSTKLRKYCKDPSPSLTCLRLDNDNSHIGVWQKRAGPHSDSNWVMRVELGGKKKTIESEEIGSKQHTIDGGNNSNADNENRVVVEEEERVALQMIEELLNWNYPCGSTSSN

SEQ ID NO: 49 - protein, 197 aa, Medicago truncatula
  transcription factor shine (SHN5), MtSHN5
MVQRNKFRGVRQRQWGSWVSEIRHPLLKRRVWLGTFETAEAAARAYDQAAILMNGKNAKTNFPIPKDQTEDANSLTPNCDDNNNSFHTSNALSHLLKQKLTKCCQKQSQSLTCLRLDADNSHIGVWQKGAGSHSDSNWILRVELGKKHEDSHESNYVSSSEKSAPNNSTIVGDCAEKNGIEHEEDIVTMQMIEELLN

SEQ ID NO: 50 - protein, 205 aa, Oryza sativa
  transcription factor shine (SHN1), OsSHN1
MVQPKKKFRGVRQRHWGSWVSEIRHPLLKRRVWLGTFETAEEAARAYDEAAVLMSGRNAKTNFPVQRNSTGDLATAADQDARSNGGSRNSSAGNLSQILSAKLRKCCKAPSPSLTCLRLDPEKSHIGVWQKRAGARADSNWVMTVELNKEVEPTEPAAQPTSTATASQVTMDDEEKIALQMIEELLSRSSPASPSHGEGEGSFVI

SEQ ID NO: 51 - protein, 225 aa, Brachypodium distachyon
  transcription factor shine (SHN1), BdSHN1
MVQSKKKFRGVRQRHWGSWVSEIRHPLLKRRVWLGTFETAEEAARAYDEAAILMSGRNAKTNFPVPRSATGEIIVAPAAARDSRGGGLGSSSGAGSLSQILSAKLRKCCKTPSPSLTCLRLDTEKSHIGVWQKRAGTRADSSWVMTVELNKEPAAAATTTTLSDSVAPTTPSTSSTSASTAGSPPVGMDDEERIALQMIEELLGGSSPNSPSHGLLQGEEGSFVI

SEQ ID NO: 52 - protein, 211 aa, Brachypodium distachyon
  transcription factor shine (SHN2), BdSHN2
MVQPKKKFRGVRQRHWGSWVSEIRHPLLKRRVWLGTFETAEEAARAYDEAAVLMSGRNAKTNFPVQRSSTGDPAPAAGRDVRGGNGGGSSSSSMSNLSQILSAKLRKCCKAPSPSLTCLRLDPEKSHIGVWQKRAGARADSNWVMTVELNKGVGLPSDVEAQSTISTATTSSSVSTMDDEEKLTLQMIEELLSRSGPVSPSHGEDEGDFVV

SEQ ID NO: 53 - protein, 204 aa, Zea mays
  transcription factor shine (SHN1), ZmSHN1
MVQPKKFRGVRQRHWGSWVSEIRHPLLKRRVWLGTFETAEEAARAYDEAAVLMSGRNAKTNFPIQRSSTGEPTPAAGRDARSNFSSGSSTTNLSQILSAKLRKCCKAPSPSLTCLRLDPEKSHIGVWQKRAGARADSNWVMTVELNKDAASTDAASQSTSATTAPPATPMDEEERIALQMIEELLSSSSPASPSNGDDQGRFII

SEQ ID NO: 54 - protein, 204 aa, Sorghum bicolor
  transcription factor shine (SHN1), SbSHN1
MVQPKKFRGVRQRHWGSWVSEIRHPLLKRRVWLGTFETAEEAARAYDEAAVLMSGRNAKTNFPVQRSSTGEPTPAAGRDAHSNAGSGSSTANLSQILSAKLRKCCKAPSPSLTCLRLDPEKSHIGVWQKRAGARADSNWVMTVELNKGAASTDAASQSTSATTAPPATPMDDEERIALQMIEELLSSSSPASPSHGDDQGRFII

SEQ ID NO: 55 - protein, 235 aa, Sorghum bicolor
  transcription factor shine (SHN2), SbSHN2
MVQSKKKFRGVRQRHWGSWVSEIRHPLLKRRVWLGTFETAEEAARAYDEAAVLMSGRNAKTNFPVPRTATGELAPVPAARDARGGGGSSSAAAAPGGGTSNLSQILSAKLRKCCKTPSPSLTCLRLDPEKSHIGVWQKRAGARADSSWVMTVQLNKDVPPPASSSGEEPVPSDGGAAATTPTSTSTSSTVTTTGSPPPAMMMDDEERIALQMIEELLGSSHSHGMFQGAAGSIVI

SEQ ID NO: 56 - protein, 171 aa, Hordeum vulgare
  transcription factor shine (SHN1), HvSHN1
MVQSKKKFRGVRQRHWGSWVSEIRHPLLKRRVWLGTFETAEEAARAYDEAAILMSGRNAKTNFPVPRSANGEIIVAPAAAARDIRGGVGSSSSGAAGASSLSQILSAKLRKCCKTPSPSLTCLRLDTEKSHIGVWQKRAGARADSSWVMTVELNKEPAAAAPPTPSDSTVS

SEQ ID NO: 57 - protein, 209 aa, Picea sitchensis
  transcription factor shine (SHN1), PsSHN1
MARPQRYRGVRQRHWGSWVSEIRHPLLKTRIWLGTFETAEDAARAYDEAARMMCGPRARTNFPFNPNAPQSPSSKVLSSTLTAKLHRCYMASMQGPRSGSSKKDSMARADKNNNIHSGNQSLTCLRLDNERSNNIGIWQKKSGSKQSESNWLMKLELDHDQHGNSTLKRETDDDIAQMIEELLDCGSLEICSPIASADSNINSAESMLN

SEQ ID NO: 58 - protein, 224 aa, Selaginella moellendorffii
  transcription factor shine (SHN1), SmSHN1
MGRPQRYRGVRQRHWGSWVSEIRHPLLKTRVWLGTFETAEDAARAYDEAARLMGGPRARTNFPYDPNAPPHPSSSTLLSTLSAKLNRCFSSSSSSSSCSTDPHKKDPRVSQSLTCLRLDPEQSNLGIWQKKSGRQPESNWVMKVHFGSQGGGGVSSDIVLPTDNPAPPQPIEHKKMKSEEDLATEMIEELLNFPDSSSPSSSTSSSEAKNPNFSSSDLLHHILV

SEQ ID NO: 59 - protein, 212 aa, Physcomitrella patens
  transcription factor shine (SHN1), PpSHN1
MGRPQRYRGVRQRHWGSWVSEIRHPLLKTRVWLGTFETAEDAAHAYDEAARLMCGVRARTNFPYDPNASKRPNSQMLSATLSAKLHRWYLHSQQRDGQEGKSKDARMTQSLTCLCLDAEQSNLGIWQKKTGRQAEANWVRKVQFGDNNSPQTDSPQPENSSESCMSEEDKFAAEMIEELLGYSPGQFSNFGSPAMSDSSCSSSCSAVTTAFE

SEQ ID NO: 60 - DNA, 3000 bp, Arabidopsis thaliana
  promoter (1)...(3000): aldehyde decarbonylase (CER1) wax/cutin promoter, pAtCER1, At1g02205
tgggatcctctccatcgtttccatcatgggatacattacttacattgacttcatgaacaacatgggacattgcaacttcgagcttttccctaagcgtctcttccacctcttccctcccctcaagttcctctgttacaccccctcgtacgtcgtttgtaaaaacactactatttatttggatttgaatatatgcatgcatttataacatggcatcaaatatgttgaaggtttcactcgctccaccacacgcagttccggaccaactactctctgttcatgccaatatacgacttcatctacgggacgactgataatttgaccgactcactatacgagaggtcgttggagatagaggaagaatcacccgacgtcatccacctcactcacctcaccacacacaactccatctaccaaatgcgccttggtttcccgtccctctcctcttgccccttgtggtctcgacccccatggtacctcacatgcttcatgtggcccttcactctcctctgctcatttgccctcacttcagctatccctttgcgcacctttgtctttgagcgaaaccgtctccgtgacctcaccgttcactctcacctccttcccaagttttcctttcacgtaagcattttacacgcatgcatatgcactttccctctctctcgctctcttgacacaaacgggtttacttattatgttgtacttcacaccactattttccaaactttcacacacaaaaaaaacattgattctcacttaacttgtacgtactacgtaggaaggacataaccttttatacaaaaagaaaattaaaacaacctaaaaatgaacaatgaacattttcttgtgggtataccttttgtaagttgcatctaaagtttattaataattttgcctcataaacatgcggcggtagtataaatcacagcgccaccatgagtccatcaacactatcatagaggaagctatccttgaagcagatgaaaagggtgtgaaagtaatgagtcttggcctgatgaacaatgtaagtttatttacttcaaatccccctaaatatatatgaatcactattggataagtactgtaactaattacacacgctggcaaaagaaaaaagtaactaatcaacacacaattaattaatgagagggaggaactaaacgggtctggagaaatgtacgtgcaaaagtatccgaagttgaagataagactagtggacgggagcagcatggcagctacggtggttatcaacaatattccaaaggaagccacggaaattgtctttagaggaaatctcacaaaggtggcttcggctgttgtctttgctctgtgccaaaagggcgtcaaggtttgtgaatatatgagggaattggaatatatatactcagcttctcatatcaaacaaaaaataatgtagtaatgtgtatatataggtggtcgtgttacgcgaggaggaacacagcaaactcatcaaatctggggttgacaagaatctggtactgtctacaagcaatagttattactccccaaaggtgtggttggtgggggatggaatagagaacgaagagcagatgaaagcaaaagaaggaaccctctttgttcccttttctcactttccgcccaacaaactccgcaaggactgtttctaccagtccactccagctatgcgtgttcccaagtctgcccaaaacatcgactcctgtgaggtacatctttgaattcttatagatatatctgtaacttttatattatataagctgatagatgtgttcatctataatgaatgaatggttgttatatatatatagaactggctggggaggagggtgatgagtgcatggaaaataggaggtatagtgcatgcacttgagggttgggaggagcatgactgcggcaacacttgcaacgtcctccgtctccacgccatatgggaagctgctcttcgccatgatttccaacctctcccaccatctcctctatgagcttttttcatattcatacatctatgtcccctttcttgattatatctacttcccttccatcattgtttgctgtttactatgtttttctatcgacaatatataagtacccttgttacccttggtgccacgtgcttcatatatgttagaaagggcaaaaaaattcgtcgtatgatatgcttagttaaattttataaaactcaataaaaatcttcagaaacagtgctatgatcattacatcttaactaagtgatatatatctgcgtgcctatttaacaaaataaacaaaaaaacaaaacaaaatatatttgggtgcatcatcaaatcaaagtagttgcaaaaactggacgaggtttttacttaaatggtccttaccccgcatggtccacttgctacctaattaaggattggtagggtgcgtatacgtatataaattgtggcggtgggagatggagttactaaaaacgaaacgtacaagtattattcatagctctcgtataaggggttagtccttagatctagatattttcacttttctttcatttatgtcggagcaacagacactagctggcgcttcaacgtgcatgatcttgattggctagtaaattccaagcatcaatacctaacacatgcccaacttggttcattagtattctttcattggtaaaatacccttacctttcaataatatccagaaataaatatatgaagccatccatcaaccggtgcatttcctcaaggcatggatatgatatcagaacatcgatgaaggtgggagggggtaattagctgagtgtcataaatgaggatccatgtggagatcatcgaatggtagtagtacatgtttggtcttagctggccccaccacaaggaattggactggtgggaagataggggtggttacgtcattccacatatctaccaattaaggagtttaatataaaccttgctatataatgtaccttggctcacaagagttgaagagacacagtgacgacacaaacatattacattcgacggtata

SEQ ID NO: 61 - DNA, 3000 bp, Arabidopsis thaliana
  promoter (1)...(3000): BAHD-type acyl -transferase (CER2, VC2), wax/cutin promoter, pAtCER2, At4g24510
atcgtactaaaaatctgggaagtacactgatccgatggaaatgaaggagaagattgtacattttatcgtgatgattcgtcataaactgagactggagagagcgaagctgaacagctttagcagctgaagctgcttcctcttctggcttagaagcattccttggacgaccgtgcattcttctccgacgactgtgagagatgcgacagtgtgattcaacttttccggttaaatctgatcagaaattacgaaaacagttaaaacaaacactagatcgaggaaagaaaaaacgtgatccaaatctagaaacaacagagatgacgaaatggagaataagaagcagatcacctgaaaggagcacgttgcggcgtcgatcgagagagagagacttttgttttcgggcaattgagcgactgagagaaggttctatcggaaaatttaatgggccggtttaatgatttcaatcgcttaaaccagtaaaccgggtttaattgaaaaatacggtcgaacactaacccggttttggaagtcttcgtttatgtagtgaaaggcttcgtcatcatcgttgtttcacagttgaaggttttcacgagaaagtgaagatttttggagaaaccatacttttgtgaaggttcgtttcaccttcaatttcgtttttccaatttgggtatccgataattgtaagaatttggggttttaaggtcagattgattatgtatctaatgcttttacattgtagtagctcgtgttttggattttgaaggattgatttctaaatttccttttgatcttgtagttgaatcacaatggaagattcagagaaaagaaaacagatgttaaaagcaatgcgaatggaagctgcagcgcagaatgatgatgatgctactacaggtactgaaacatctatgagcacaggtcacctctccaatccattggcagagacatccaatcaccagcaggattcatttgaaacgcaaaggtttgattattataccgatcccatggctgcttattctagtttcaagaaaaacaagacccctaagcaacaatacatctcatctcctagtcatcaaggaagctctcctgtaccacctcagtttccaccatcagttcctccaggtgcttgtttctgccttgatagtcaatgactctgtcttaatttttgttttgtctatattcttgtgaggccaaagaaagtagtccactgataaagaagattgcctaatatcatgagagtttaacttacagtatgttagttggtccttggtgagtataggtataggattgaacagaatcaggaattcactttggtatttggttgttgggctttcgtagagttaggtgatgattctcttctacaaatctatatgaaatttttgttctttgtttgggtttagtcatgtgttcttgattataatctacaaatcaagatcaatggaggaagaaatttgtctctcagtctcaggcttcaaacttattagctttagctactttaatttgatatatctctttaagtttcactttctaggaattgacagtatgaaaatcacatcaattatggaattcagttaggtttgtgtcctgtgccttgcaatgaacagtaatccagttctgatccttgcattataactttgaacaggatcattatgtagtgagtatcaggcacagaccaatcatggtggctttcatgcagctcattatgaaccaagagggatggcacatctttcaccctcacacagaggtccacccgccggttggaataacaactttaggcctccaccagttaaccattcaggtccacctcaatgggtacctcgcccttttccattctctcaagaaatgccgaacatggggaataatagatttggtggtcgaggcagctacaacaatactcctccacagttttccaattatggacgacaaaatgcaaactggggtggaaacacgtatcctaactcaggaagaggcagaagtcgaggacgcggtatgaacacaagctttgggagagatggaggaagaagacccatggaaccaggggcagaacgattttactccaactctatggctgaagatccatggaagcatcttaagccagtcttatggaagaattgctcagatgcttcgagcagcagctcaacaggtcaagcctggcttcccaagtctatagcaccaaaaaaatctgtgacctcagaagctacccacaaaactagcagtaatcagcagagccttgctgagtaccttgctgcttctctagatggtgctacatgcgatgagtcaagcaattaatcaggacaactggcctagtgaaaatacaccaagtccaagcatctgaggtacctggaaagatcaccgttgactctttcgaactaggtattgttcagtgacttgtgtttattttcttaacaagacacaacagcgaatgatgaacatctctgagggcgcaattaggagtagattggttggcaatagggatgttctctaccaaaaattttactgttttttcgcaagatttagttatcgtacaattatgtaaaatcattatcaggaaatttgttgcatgattgtgtttgaggtggaaatgaaccgcatccgtattaagatcatttttgctggtggaaacaatgttaccaggaaactgaacttggttttttatagattaatgtgacttgttaggtaccgtaatataatactagttggctacgacacgtacatgtgcgtttattgcttgaagccaataaggacaaggtggacgtaataaagtgtgcttgttgttggatggatctgaatatgatgactcaactgtccaactctaatgttgttgctaaagacccaaatcccacccacatttaatgttgccgtcacggaaacagttttcccaactgtcctaaatcagtgatacccatgcctattctgaactcaactctctttcgaaactcaatccttatataacacatcccatttaagcctataagctacacatatcagctctctcacaaaaataaa

SEQ ID NO: 62 - DNA, 3000 bp, Arabidopsis thaliana
  promoter (1)...(3000): sterol desaturase (CER3, WAX2), wax/cutin promoter, pAtCER3, At5g57800
attttaagaaattaaatctttttttttggtatctgtgtgttactttttataaatgtattttgaaaagtattatttcaatttatagataaatataattatgactctcaagtggatttttttttcacggtcaattggagtttggctgtgaatcttgtgaataatatcaactaattaagagtcggccgatactccgtatctttgatcactttcacccatatcttgaaatttaccaaatgttttctttcattggggtttctataccttttttttttggttctttctgtaatttgggttttaaagaaaaaacctataattacaaaaaaggttaaaagttaaaactaagcacgttcaaatatgttctttcgagatcccaccttcctgtctatcttataagaagtcgaacacgtgtgctcgttgtgtgaattagagtggttatttcaacatatataattaaactatgtatgtatcataaatacactgaatatgttggagttgggtcttgtggtaggctaacttgttcgcttcactttggtttagtttagccttgtaatcggtggtttcatatactgaaatttttaattttctaatataatccagatgacaaaaaaaaatcataaatacactgcaatggccatttttaaaaaaactttaaacgaaatatatatacatcaccaagtatcaagtaagtaatttggttgttttgatttttcaaaaaaacatttaggtgattcttttaacaaccaatcatatatgtagcaaagattaattatgtcaatcttttaacgtcacttatatagtttagctgtagtattattgtaagccaattgtacggacttcgtaaccgtttcgacaaagatacaaactaatcaatgtttaagatggcataatattccgacttcccctgccactcggtagtactgctgcgccatcctacaagaagcactcgtaaatgagtggttagacggccaaaaattagcaggattcaatccttgattaagagatggttcagataagccctctaggcctctactcgtcacaattcatatattaattgatcacactgcatgaaatgataagatcaagtcaattacctcaaaattaattgaaagataaaatgataaagcaacaagtaatgatcatatatggatgtaacaaccttcttcatccatacgaatatgataattcttttgtcgatcatttgccacatctatttaactaagtattttgtacattaagatcattttgcgagtattcccgcgttcccaacaaaaacgaattgaaaaactacatagggtgaattttgctctcgtggcattaaagagagaggctgacattatagattatgatatatttattatttttcttagtagatttcttgaccagcctttagatatgcttgctctgtcatggcataaagccttaaaccctaaagccctttacatttgtacagtaccaacaattgtacccaatgttaaatgaatgcggattaatttgtgatatgagaccatcaaaataaaatacttataagatagtagatatatagaaccgtaacaaaaagatgagaagaaaaagacaaattgaatagaaactggaccaaaagataaaagagtatatgaagaagcaagccaccaagaagtgtaaccatcgttgcttcaactgtaaaccgcacattaaatgtgtgtgagagaaagagagatagactccagctgtgagagctacgtccattgcatcaattgggttatatgtcgttaacaattttttaaaaatacataaataaatcaataaaatatttagaaaaaatcaatattataatgatattttgaagaagttaggtccataatggaaatatagagacttagtgtctatttatcaagaaatagtgtctatttatcaagaaataatgtctatttggtccacaattatcatattttttgtggccactcaaactacgaaaataatgaatattgttaatttttgtcttatttaagtctataactaacttactaattcggttgaaattgctaatatgcattttccttggtccactattacagtgctactgctgtcttattcttgaacacaaaataaaaaagatttcaaacacaaaatatgcatttttttgttccaccattacaaacctttatttggagaagtatacagttggatattaaatattttaattaaaaaattgaaaatattgaagttctttttctccagtattttggctggagcaaaactaaataaattccaaattaaaagctcgaacggaaaacatttactatgcaccaaaataaatgttgatatgaaatttgcatcagcatatacagtatgtatgtagtacaattgaacagagtcaaaattaattgtcactgaaacagtcagattttatttctgttaaaaaatattttcagacaaaaaatgattttttaacgtttttttatataattttattaaacctcaaaacattcctcagcagattgttttataatgttattattattttttcttaaataattttatttgaatttcgttatagagagataaataaaagatttttggggtctagttggctctcatagtttgaatgcttatataaggaaacagagctcgaggctctcaataatgccacataaaacacaacaccaaagcctttataactctttctggggtttttaattctctcaacgaacaaaaaaaaaaactcaactaatattctccatcctctttcttcagatttaagagaaaccttatcgttatattctctcttctcttttctttttgactcccacaagaagaaagcaaatttctttttctcaggattgcttgaaaactgtagaaatctttaaggtttttttacaccaataagagtcagagagagagagagagagagaaagagagatctattcataaaaaagacaggtaatctcaactccgaggagataactgatataacaatttgagagaataagaagaagaagaagaagaagaccaagctaaaga

SEQ ID NO: 63 - DNA, 3000 bp, Arabidopsis thaliana
  promoter (1)...(3000): fatty acyl-CoA reductase (CER4, FAR3), wax/cutin promoter, pAtCER4, At4g33790
ttcttcaaggaacaaagatctatcttttggttgcgtttacatagtgtttacgttccatgttataattattagctcatattagaaacccagacgtaaacacaaacaaataatcatgtcactatacagaatttacctagtatagaagtccatgatttttgttctttttaccttttaatagaaaagttttgttctttagttttttgggatttaacattcgttttaatatatcttgtagatgttgcagaaaagtgttggtggtaataagatagagcaaacctttccagaaagtacattggattactcacaaggcttctcggctactcagtttcaggtttctctctcttcactatctctctgttaggttctgttgagtacacgtgacttgtctcaagaatctcactatatatgtctttgggtgttgaaacaagcaggacaaaacagcattccaagagcagtgtggttatttgcatatggaaaccagattctaaataaccagttcagtaattttttattattatttctgtagatgttcaactactttgtttattcttactttataaagaatatatcaaatctgactaaaattaactttgaaattcgctggtgaagatcaaactgatgaagagcagcagctattttggacatttgtgaagcttttatggattcaacttgaatcatttcaagcagtgattaaagtgaaactttaacgtcccaaatatgaaaaataggaaggagttttaagcaaaagactgatatagaacgaaaaaaaaaaagggttctcaaatctcaactggactgattcttttctctcttttgctttgtaatttcgtcacaaacaagttttccttgtagccgcctttatgtaactcgtggtttacaaattacaacacttcacttccattgcaattttctttcatagtataacaaatttcaatgcctgaataagctttttttttgtgtggggaaaaaaacttccaagaaatatctagcaaaacaaatgatcttaatggttcttttcagagctgctaaattctcaaaagaataattcgaagtagatgacaaagagggcatattcaaaacttataaagaaactaataaaacgtattactttaaatagagcacgaaaacctatatataaccaaaatgctaaccctaaaagtaacacttgaagaatgcgtaacactaacgcaataaaaggggaaaatagaaacttatcaaaatctggttatcggcttgtttttatagtcactcttcatatgcatcagtgtttgagattctgcagattgttgtagcagatcatgtttaaagtccgttatttgtagctcttttgagttactagcgattttggaggtgttaaccggcccaagcatgaataggcctgatggtattctggtccatctgagcttggccgaagttaattgcaaaattaaaattaagtttatattattatgcttttgtctatctcttgactttaattaatcttttaaggttaattggttattggtagttgagggtgtttcagttaaccttaaataaaaaacttaattgacttaaattatagtaaaaaccaaaccaaaccaaatagagatccaaatttaaatgtacataatctaccactttcataatgtaaaaatccaagtgttatcagctgccgcatttgttctgtcttctatatgtcgaatacgagtacataaactacaactttgataatctaattttaggattttaatatgctaggctgttttgcgtttgtcatgagtagggtcgaatcatgccttagccagtcgtactagtatagatggttgtaagttggatttgatgacaactgctttggatttgatgacaagtaactacttaaaagcaatggttaggcagacattaaataggtggtgatctaatgtctaacatctaaaacgttttaattggaatttaaacgagtttagatggtctaattaagcgtttattatgtacataatagaacgtataaaatatcatgattcacagaagtaaatttaaaatgttttaattttagaagtaaatttaaaattcaaactacatcaaaaattcaatagaaatcaacttaaagataaccataaaatcaattcaattgacatcaaataatagaagccatctactttttatgttataaaacttataatgaattttatgtcattataaatcgaaaaactacactgaaatgaacaaaaagtcaaatgacaacagattaatgattatgtaaactgtataatgtcgattaaaaccacataatgccatcaattatttagcacctatcaaataattgtcacggttgtatatatggcgcgcctagaccgccacttaaagcgctatttcaagtattgttacaaacgaagaaggtaggcggtctaatttttaagtctaaaattagatatctttggacgcctcatattacttattgttttactctgtcggatcctatctcacccaaccatacatttgtggcaacagaaattgcctccaaatgcaaaaaaaaaaatcattctttctactgttaatacttcgaaatatacaatttttaaagttaatatgtgtttaaataccattttgatctaaattttgtgttttgtgtttctttctatatatatatgtacgttttccattatatcagaatcgaatcatatctaaccatatatgaattagtctcggtagttgtaatttggaatatttatttcgcttttcaacgttggtaggttcaaaaatacttaagttaagccacgtttaatttaaatacgttcatatttagaatatgtagagttgaaatttataacttaagtatatgttatggaatttgttgacagctattttaaagtagttgggacaaaacaaaaatgtaggtaggtgctcacattaatttcaccttgtaaagcctaaaactataaatcttagtaacacatatgtgatatgtcagttgtactctgttgcattatttctctcactcaaacgtatatacaaacataaatt

SEQ ID NO: 64 - DNA, 3000 bp, Arabidopsis thaliana
  promoter (1)...(3000): ABC transporter (CER5, WBC12, ABCG12), wax/cutin promoter, pAtCER5, At1g51500
tattgtgaagctaatttttttgcttagttatgttgatatcattttgccttttggtttgttatagtgaagcttgatttgttggattgttgtcatgatgtaatttagagatgaatgcaatactgttttgtcgtagatgttgactttactctttgacatgctttgtgttaatcaatgtaatactgaatatctgaaattgagagccaaaaatgataaatttatctttgcaatgttacattgcttttaagagggagatgtaatattctgtaaagtgcaatgctgttccctaaggacacttcgtttaagttacttcaaagtgtcagaaatgacgggtcgaataagataagctgtcttctagatgcgagtttaggaatcaaatattatttttctttagtttgcttgagttctcatggaagtggaagtaacactttgcttttgttttttttgataagggatatgctttgatagaatatgagaagaaggaagaagcacagagcgctatttcagcaatgaatggtgctgagcttctaacacagaatgttagcgttgactgggccttcagcagcggtcccagtggtggtgaatcttacaggagaaagaactcgaggtttgtatcctaatctcttttctgttccgctacgacttgtctgatcttgtgccgatatgaagtcaagagtgtcaaaaagtatcaattaagatatagacttagaagttttaacagttgacaaggtagtatattgtactaagcacctaccaaactttactgtctttatgctaatgaatcgaaatcacttgtgacttgtcaagtagttatacctttctttaaatcatcatccattgatcattggggttttacaggtatgggaggtcgcaacgttcaagaagtccgagaagacgttactgattgtatgatttggtggagagttctccccatatctctctgtattagggattccctctcttatctgtaaggtactgatgcaagacgctgagtgttgaacaaatttttttctggggtttttgtagggtttggctgcttttgcattggtttatctctttatgcatttgcatgggattgttgcgtttaaacaccatgagatctgttttaatgctttgtattggtaaaagaagagaaacattggatgaggaagaatgttttaattttcattctcttattgattcatatttaggtcagacagaatttgaaaatcaaagaccttccattacactagaaaaccaaatatgattatatagaaaaaatcaaagaattttcaaccaatggcattatttcacactggtttattattctaggcgtaactattggtaacctaaatatgttaacagaaatcatcaaatgactattaaatattttggctgaaattttccaatcaatggcaatattcacatcgtttgtttttataggcgtaactattcgtatcctaaatatgttaaaagaaatcatcaaaggtttgatgatttgagatagagcatgtactttcttgctactcacaggttgcatgatttcatttgtacgaatcaatcatctatactttgtgcattgagccagtcccacattatgtttatgtatccatctattttaagggctctcatatactaacttacagctgaaaagtataaatatgaaacagttggaacagttatataagttctgcttttgttgtcaccaacaaaaaaaatgatatgcttttacatgattccaacaaaaaaaaaacagttttgtattcttgttaatgatggtgccaaaggcttataagaccataccttagattctgttgaatttagaatctgggtttctatctcttttctggaaatcttgtttctttttgttttctttttataccaaaactttgtgaaatcttaggtacttttgtttagtatcagtttactcgtttaaaaagaaccaataaacctactagatataaatagtaagaagtctataacttagggttgtgttaaatactaaacaatgcttaaaaatgtggttagacatagcgctatactaaagctaaaaagctaaagataaccataaaatcatgaagataataaatggacggatagaccaaaaagaaataatgaagcataatacaaaaaaaaaactatatcggttccaactaccacacatttaattcctttcccttttcatttaacacctgtgaagactcgttgcgagggttctctacctctttatgtcattcaaacttatcaattatcaagtctcttgattttacatgttcaaccaaacacgatttttcaaacttaattttatatatcttcttcattaattatcgaatatcacttctcttgcttatagttacaaaaactaatacaatgataattatataattctatgtgtgaacaaaacgataaatttgtcaaagtatcactatcaatcccttggaattagtagacaaccaaatatggatcctttaattgatttgtgatgtttctattcatttcgaactaaatgaaaacatctcatcgtaaataatcacactgttaaatttcatttcacaaaaatatcatttgatttctgtgtggacgaaatttcttgttagttggcaagaaccgacataaaaaatatatttcatacgtataatagtatgtcaataagtaggtggttgcttactagttactactacacatggacgattgtataaatattagacctcattcacacaactctcactctcttacatttaatgtgcaagaaaataaaaaaaactatatactatagacgtgtatctatatatggttatgatattaaagccatccattaaatgtaattagttgtttgttgattgttgctctcaagtctcacctaaagaaaaccttaggcctacaaaaattaatcactatctttataattccatctccaaccaatataataaaaataacctagacgaagaacaaacaaaactctctctttctctctctctctctaataagtaaggttttgatctttttcaagatcaaacaaaaaca

SEQ ID NO: 65 - DNA, 3000 bp, Arabidopsis thaliana
  promoter (1)...(3000): very long chain fatty acid condensing enzyme (CER6, CUT1, KCS6), wax/cutin promoter, pAtCER6, At1g68530
actaaaaattaagggaacttgtctttgatattttatttactagttatatatagtccttaccgaacctcgtcggcaacatcatcagtgcgatcaagaatcgatcaccattaaaatgctttattgagcacgatcagtgttcaccatgtaagaagattattgtctcacaattcaaatcaaacctagcctaggcaacaaaaattaaatttctttaaacaatagaacaaaactcgtccgccccaaccatcctcttcacaacattccttaatcttacaatatctatataactaacgcatcatttggatttcactatgtaactaagtcgaactggtgtgaaataattataaatttaaataaataaaaaggtgaaaatatggttgtacacgaaggtatgtgaaataattatgaataactaaaatgtactgaattatttattttattttaatagcaatggaatctaaattaaatcaggatataatgaaaattttgtaaaattgtgattaaattgtcattccaaagaaatcagagaactgtctttaaaaatttggaagcgagtttaatgatatagcctatatgaatggtacagtgtgaatgtctctgagaaaaattacaattccacatttttattacagactagatgagaaaaaaacattgatgagtaggtcaaattaaaaaactatattcacgttttcggtgatacattggaaaaccatataaaacgatcatttttcaaaggaagaatagaaactttatttacatatttaattattatggaagatgaaggaagaactttatcatagactacgaaatcggtgtggctaatgaaatacagacaccttatatattacatattaaatgtacatttcaatctggtggatagttccaaactaatcttcttcatcaaatattgttggcattaatgatctcactatggaacacgaaaattcagcaatgttcatttttagttaagaaacaaatcctcttacgaactctgtaagatcttgaaggatcaaaagcctttgatctcaatttctgtatagtttttattagcctagtgctttatatatgtttgatacttctgtttggcaatatcaatcatagtagaaaagatatggacttcatttgaggtttttggtggattgtgtctatatgtgaaatcatgggatctcaagatttgtctgcattcagtttccaagtcaaacatcgtaactactgtttgattttccctcatgcttgcagttttcatggatatctcaagatttgtcttcttgcactttccaagtcaaacataaagtaactactgattgatattccctcgtgtattaccctctttcaaatgacacaattgggcccaagtagaggaatttcatagtgaattcaaaagattaactgtattccaccgtcgtattttgataacatttagttattccttttcttttttttcttctgcaacagtttttttttaatacatttagtgttggtttggttcaatgaaatattatatgttacttctttttttggaaataaattattcattctttctactataaaaggaattgttcatgcttttttgatacaatagtataccatttcaaaagataccatagaccagttattacatgaatcgccaaaacaacactaaaatcagaaaatcagtatattttggtatagtctccaacatacaatcataaaacctctgtgaaatttaaaatctatatttgacatttcaaagtttaacaacatagttctaaataattacctaaattttaagtcaaatgtgaattatattttactcttcgatatcggttgttgacgattaaccatgcaaaaaagaaacattaattgcgaatgtaaataacaaaacatgtaactcttgtagatatacatgtatcgacatttaaacccgaatatatatgtatacctataatttctctgattttcacgctacctgccacgtacatgggtgataggtccaaactcacaagtaaaagtttacgtacagtgaattcgtctttttgggtataaacgtacatttaatttacacgtaagaaaggattaccaattctttcatttatggtaccagacagagttaaggcaaacaagagaaacatatagagttttgatatgttttcttggataaatattaaattgatgcaatatttagggatggacacaaggtaatatatgccttttaaggtatatgtgctatatgaatcgtttcgcatgggtactaaaattatttgtccttactttatataaacaaattccaacaaaatcaagtttttgctaaaactagtttatttgcgggttatttaattacctatcatattacttgtaatatcattcgtatgttaacgggtaaaccaaaccaaaccggatattgaactattaaaaatcttgtaaatttgacacaaactaatgaatatctaaattatgttactgctatgataacgaccatttttgtttttgagaaccataatataaattacaggtacgtgacaagtactaagtatttatatccacctttagtcacagtaccaatattgcgcctaccgggcaacgtgaacgtgatcatcaaatcaaagtagttaccaaacgctttgatctcgataaaactaaaagctgacacgtcttgctgtttcttaatttatttctcttacaacgacaattttgagaaatatgaaatttttatatcgaaagggaacagtccttatcatttgctcccatcacttgcttttgtctagttacaactggaaatcgaagagaagtattacaaaaacatttttctcgtcatttataaaaaaatgacaaaaaattaaatagagagcaaagcaagagcgttgggtgacgttggtctcttcattaactcctctcatctaccccttcctctgttcgcctttatatccttcaccttccctctctcatcttcattaactcatcttcaaaaataccctaatcacattttgtaacaataatacaattatacattaaaactctccgacg

SEQ ID NO: 66 - DNA, 3000 bp, Arabidopsis thaliana
  promoter (1)...(3000): enoyl-CoA reductase (CER10, ECR), wax/cutin promoter, pAtCER10, At3g55360
cctttgcatggcgagattttttatcccgaaagttcagtctaagaatgatgtaaaattcctctgttaagaaaaaaatgcctttaacaaaataaagaattcgatgttgaagaagaagaatatatatattttggtgctaatttgcagcacaagatataaaaattagaaagtataagccaaaaaatcaaatcatgattcgacaaggttgtttttaattctttcgtgattcttgatgttatacccctaatataacttaccgataacattgaattagtgaaaaatatttcgaattatgatcaccagtctctatattatatttgatgattttatggttacgaatgtgaggggtacgtaagattagtaaagacggacatgttgtaggaaggtgtcccagtccgcgatttctaaaagaaagatttgtggtccaaacgtaaaatttaatcagaccttctttttaatggacctcactatgtcgacacacaacatcaaacatatccctaactatatagttcataatcaagatgttttttaccagaaaaatataacatcaaacatgtctctctctaatcattatatttataagtttttcgtatcagactaagaaagtatatatcaacctgagacaaaatgatccggtaagaagaacttcaatttagatgacaaaacttccaattaatttgaattacttagaaagggatgaagttgagacacaaagaaagaatataatagatatattgccttagcttgtaattcacagtttagttgtttcaaagagcaatatcattggaatttcgtagtaaccaatatatattgtggttatatatttgtggggagtgtgtatatgtatttgatatgttgatatttttcttcaaaagacagatgatagagctaaaacgattttttgtcgatatgttgcgcttcgaagtagctgaacctgagtgataatgtcttcatctattggacaagtagggaagaagctagctcgccgtatgcaaatacataaagttccatgtttcacttcttctaggggtgaatagacgaggacacacgatacagtttgtcatgttaatctttcaagctcaaaaaatataaaaattgtatgaaaatctgatacggtaaatctatatattcttttgcatgtttttaaaggagcacttatctttatttgttatagaaatttattatttaaaagaaattcgtctttatagaaatgtgcatgtgttttttttattagtaacacattttcatgcaacaggaatcttcgcttatctgtagtgtacatctcatgagcccatattcatagttgtaaagcaacaccttctctgcagctttttctttcctattgttttttgtatccatagttcacatctacacactatataaggctattacaaacaatgatacaatatatgttctcatataatttgatcttaattttcaagatatttaaggtgggaaaatatcgagatagtatacaatggaaatcgttaccacgtgcatgccaatctttagtagaagaagattcctagattccaacaagaacatgcgcattttttcacgaaaggctggaaagtttaatatataatggtcgaaaaaataggcataatctatttaagtactagcttaagtgttttacgctagatctggtgttgacacttgtacacctggttttaaagttgcagagaaaactagattaatgctcaaattgtagtaagtagattggataatttacactcggaaaaaacaagttttttcagaagaattagactgttgctcacttgagaaaaatctagctagctttgttaattgaggatagttagttatagtatttgaatgacattaaggtgtttgaatatcgcatgaattgtcgccttggtatttgggcaattaccggtcattattttgatctttgtgatgtcaactaatcgatcccaaccatatatatcataaactactgtctcttaattgatccattgtgtttttaattttatcattactttttttaactagttgagagaatgattatctaacccctttcatattcagaaaacttaggttttgagtttttgctttatttgctgctctcttgaattaatagagctctcgtatgcgattgactttgggtgatttttttttgttggaaaagcaaatttcattgaccaatataactaaactaacacactacttccatgtggttaagggccgggatcatttattatttgcatcttttatacgacaatgacaaggattcgttctcattactccatcccattttgtggtatgtaaaatcctaacttttttactgcattgatacaacattttattttagcattagatcaatacgatggacatatgtcatcaagtgagggggtagaagtttgcaactaatgtttttgtgctcatgaatcaatctcttctaggtaacattatttcactcttttctatagcgaatactgcaatgcttttacgttttaactaaacatgactaaaccaaataccaaaaaaaaaacgagtaacactttggtggttcctatctaagttgaccggatcactcgatttgataaaaaaaattatagtaaaagtttttgtttttgaatacaaattatatatttgactaaaattcgaaacttaaccgaaactaaaaccttagcagataatctatagtatagtagattcataaaccgaaaaaacaaaaatctaaacctaaactgagtaattactaatggtggatccttaaaacaaagccataatttgcaattgcaacaaatgtttttgtttggagtaaaaaccaaaaaaaaaatgatggggagcaactaaaaatgtaaaatggtcccaatctaatcgcataagttgggaagatagttagtagttctcctactcccaactacatcctcttcaatgctcaatctcgtcttcttcttcctctctatttaatttcccttgtctctctatctctctcaatttcctcatctgggtcttcctcgtttgctccgcttaagcacc

SEQ ID NO: 67 - DNA, 3000 bp, Arabidopsis thaliana
  promoter (1)...(3000): wax ester synthase (WSD1), wax/cutin promoter, pAtWSD1, At5g37300
atcacaaatgatcagttccagtgtcattagacttgagcgttagggagtttttaagaggacaaaatctattctgtcttcccgaaaaccactatgaccgtgagggggaaacaacttcgggaagatggttaaagggacataccgttcatcggtggtctaatcgatctttttctcgcaggttattctcgagttctcgcacacataaaagtttttaatcgtatgaaagttcccgaaaatttgacaaaaacttaattttttacaattataaaatttcatttaaaaaaaaacttgtttataatttgctttcttcctattaatcctttgattcctagacttattttgctttcttgctcctaaattaattgagttgctctcttggttcgatttaaattgtttgatcgacatcgatctggagtgaatttggaggaagtgtagaccctaaaaggtcgtatctcaaactcgatgttggcatgtgatgcaagaatttgacttacaagtgggtgtagatcaagggttgatgttaatctactatccgatgtaattcgatacgttccattgatgtgaggaggggccaatgttcatgcttaagcctctagtgttatcaccgaactcaagacaattgaatgctgcaagattgtgtactaagagtatgcagactgattttacgtgtcaagactttccactgcgatttcaaccacagtgtacgtatgttttcagtgacaataatacggtattattaatacccgactctttcacaaactttggaaattagtttgagttcaattcaaaatcgcatttaaaaaaataataaaaaaattacatgaaacccacaatatttggtatgaaatttaatatggtagttagtaacctcgtaggtacaacattcatcttcttgctgccgacatcataattgttcataaatatttttgaacacgtacatataatgttcatggaccaaatctgatcagactcctaattagatgaattgtgtggtcgattttgagatgtactttttgaatcataattctttcaactactcgaaataaatttccctcaccatcccaagactactagaatagcatattcttaaatataaattattatataaccaaactattattctttttaagattatcactggatgttacgttgaagttataagacatgatatatatcactcaatttcagaaatgagtagagttcttagtgcatagtttttcttaaacctacaaggctacaatgaataaagcacgacaccatactgttctcaaaatatttgtatatagtggaactcggttgaaacatatatataccagtaaagttatttttgtttttgttaataaaagagtaactcgtgaacttgaaatcaaggagctaataaaaaattatttttgtttgaatttaactttttcaaaacctaacacgaaaatcagaaattctgaggggttagaatggttctcacttgtttacgtttctacgtccaaaatactcattgagttttcacattctcaagttttggaaaaattaacaatttcgtttataccactaacatgtttaaaactataattattctaaaactttaattatcaagttcatttcgtttagctaaaatttattctgttatatagttatttattggatataaaccctaaatttagtgttttgatgccacacgtaagctgattttcaaatcacaactttataaattccctcattaatttatcttctaatgcatctatcaacaataacgttatttatatatgttgtctatatctattaatctaaatttgttacaaacaatttaagtcagcacttatcggttttatgtctacatcatacattatgtaggttgtacgatgacgtgggttgtagctagttaggtataaaaatttacttttaaaagaaaaacataatctcctcatcaaaagcttttaattgaatttaatagccagggccaaatatgccaacaatatacaccaaaaaacatatttgtcgctagaacagtgctaattaagggactcacatactattagacattagtgcatgtcagccaataggcttattgtattttcaacatgttggcccatgtcagccaataggcttatagtatttgctaaaaataaaaatatatatatttgctcaagtgttggtgttgcatggttcaatatttatcaaaactcaaaagaattgttgactaactttacatattaacaagactaatcatttttctggtttgtccttaattttaaatatgtaaaccactcatttatgatttctccaatttagaaagagtgagatgtgaagtttctcccaaagaaagaaaaaaactacaggtaaataaagtgtatactgctttccaaaatatgtcgaattatcacaaaaataaaacgaatttataattaaacatctcgttatggattttgtatagaaatttattggcctacaactgttaatagacatattatttggcattgtacgtaatctagattagccaaactatatatagaacatcatgtttagctgatttttcaaaaaaaaaaaaaaaaaaatcatgcgtagacgaaatgcaagttttaatttaattttattgctttctctggttagctctagaggtctttaatccaccgatcttaaaaaaaaatccaactttctactttctctttctaaatgaaacaattccatatttttcatttcatttatacatcatacacttaattaatgatattctctttctagtaattagtacattaatttaaatttatcaagaaaatgctgttgaacatatataatcaattattatgaaatgaaatttataatgaaatgatttgtttgatagaaagaataaattataaactacttaagagaccgacgaagatagcaacgacaaaaccctaaccttataccaaccctcatttaataccaataaaaaaagagggacaaaaaaaatcaatgctatataatcgaagtatccactacaaaggttggagaatccttaaactgact

SEQ ID NO: 68 - DNA, 3000 bp, Arabidopsis thaliana
  promoter (1)...(3000): mid-chain alkane hydrolase (MAH1, CYP96A15), wax/cutin promoter, pAtMAH1, At1g57750
gtacaaaaaaaagaacaaaatctatcatcatttaattcgttgctttatttaaataaaaaacacaaaaacttgaaatcatatactttatatgataaatttaaaatctatattagtagtataaatttaaaataatttaagggacggtataccacgagtgggatcctaaaatgattggatttattatgataataatttatttttttgaattttataacactaataatttagctaacgagataatatatacggatttatatgggatgacgggttttgatacatattgataaagaaaagtttatcacggatgaaatcttaaaattaacaatcaaaatacaattatacaaccttaaacacaaaaaaaaatattcaatattaacaaaacaaatataacttaaaatttaaaaactttagctataaaaaatcggtccacaatatattgcggataaaatattcaaaattttaaatgtataaaaatatatcttttgtattaatacttcaaaaagtgaagcctaaacaatagtaattatatactaaataataaagaaatagatatctatttaaaatacaaattaatatgatatatttttagttaatctttaaaaaaaaatattacatttaaaaaacaatattacattttaaagaaaaatatagtcccgcggtataccgcgggttaatttctagttttagattataactgaagttgttacttacaaaacaaatacagatttaaaaaaaaaaaactaattatccagacgaaacaaagaggatcataattattagtacaaaaatctaagatataaacagtagtagataaatattacccactcatagtataaacagtagaggataacttttggcattgatggacgtaataaaaaccaaaatgttgtcatactaaccaattaactactaactagaaaccagactagccaggctgtagggaagaacaacattgattgatgtagtgctacatatcgattaactactaactagaaaccagactaaccagtccatcattaatatgtataaatacatattgtatatacatatttttaacaaatgataagataatagtagtattagttttttttggtgagtaatagactaatagtattagtttttacaacagtttaaattgttcaaacaaaataaaacgatgtagtctatataaataagcaaaacaaggttcccggcggtataatatacgcatggtcgatcaatgaaaattatggatctaatcagtaaaacattattatttcttacgtaattacaatagtaatttatctcaaaggtaaaaaattattataaataagtaaaatacaaaatctaaatagcaatgaaaagaagaaaaaaaaaacatatttctcataaaacaatttacgtagttaagaagatttttttttttcacaaaaaagtagttaagaagattttatctttcatttaattgtagtggaaagatgttttttctcgcataacatgtcatttttatgtgagtggctaatttattaaattggttagattttagtagtttagatttaggggttagttttgttaaaaaattatatgataaattagagggccacaaaaaacatattttgaaatttaatacgtcatgactcttaaaacagtaaaatttaatacgtcatgactcttaaatttagccgttggatgatgaatatgcacgacttttgtgatgtacattattaacaagttatgaactaattagcaatgacaatatacgtcataatatacggtataaaataattcagacatattttacctaacaatatagcgatgaatgatgtatgtggtaacttattgacaaatttaatatgtcggtaaatataatcagtcactaatataacaacggatatgcgatgataataggttctaggtctttagcaatgagataagcgagatatttatgtaacattagtctttaaattttatatatatgtcttttctattttattttattttttgaatgaaaatgtcttctttattcgtaattttaaactcactggtggtggatatattgttatgtccccaattcgtctggcaactctcgtatattagtgagaaaaatttgtccattatttactgcactattaccctgtgttaattttttgtattgaaattgttttttagtaattcacgtcatatagcgaatgattctttaattttaaaaattcagtcttaagtttacaaattaaataacgctactgtaaccaactctgtacgaccaacatgttcgagtttttgtatatacggccatatatgtacatattttactataaagcgaaaaaatccataaattatttaattaatatataaaggtgccattctatttccaatgtgcttaggaaaatgcagaacctcgtgctatatctctgtcgccacgtgcaaatataacaatatgaaatagaactagcaaatcttgaaatctaactcttaagactaattcaagcacatacgtagagaaagttgaccaacggttatcagcattttaacatggaccttatcaacattttaacaaagtccacaaacaaccagtcttacaatcgcattggtacaagataatcgaattcatcttccatataacaaaacctaaaccttggtgtgaaaaggagaagatatgtatgttaaaggccgcctatgcctctggtttggggtatatgattctaagattagggtttgaatattttcgttagcctgccatgagatatatttatgtgataattagagcctcttatgcattaatgcataaccgactagatcatgtggtattcagctaatcagtacacacaagacaaagtagtaaatgagtttgatgaagactgtggtctgataattcctatcaacgttaaatctgtcggggccaggcagccagcaacattttgcctaacaacgctctgaattcaattgaacctaggctatataatagcaggctaacttaactaagagttttgtatctatactcataaatccttttgtctaaaa

SEQ ID NO: 69 - DNA, 3000 bp, Arabidopsis thaliana
  promoter (1)...(3000): ABC transporter (WBC11, ABCG11, DSO, COF1), wax/cutin promoter, pAtWBC11, At1g17840
gatgcgacggatacaaataaacgtatcatttcacttttctcgtctttgcggtggtttaacttttgtttgtgtgataactaatctatcatattgaatgattttaagaacgaaaaggtaagtaaaagctatttttgaaaaatacagtagtatgtattcgtttcttcttcctcagtctgtaagtaaacacggattcaatagtgaaaagaaaaaagaaaacacggattcaattattgagcactaattggttaaaggcccattatgttccattttgttttttgggctttgactcttttgtcacacatgcgttgacgtagtagaattttataaacattttagcccaatataacattctttcagcatcttgatccttcctgtatgataaaattaaaaatcgccatgaatctttggaaatcaacaaagggccagaacttataagaatatttgttttgattattaaggtctataaatgtctgtcaaacaaaaatgcatgtattgtctatatcatcaaagtatgaatatccaatactgttaaaatatttatttatccgcataaatacaaatacctctgaatatagtttttatttggattaaatactagaatttaattaagaattaattgtctaaataaccctaaaaaataaaataaaattacaaacaggcatttacgtaacgtaatgacttacagaaacaagcacttttatctttgcaaaataacggatttaccttcattcatccacaatattacaataatagctgagacttttgacgacgactatggtgaactccggccatagaaactcaaatgacggtgtgataaacgaaaaatcgtgaaagacatgactcgaatctgaaacagttgtgtaaggatctctctgtcaccgttggcatataaataccattgtttctctcctttagattccaaatttctgttttaatcacactctctgttgttgcagtttagatctatttctgaaatctcaatagaaatctttcccgattcgtttgtatgtgatctggtttttgtaaatagccattatcgggagaaattatgttgaaatcaatttctcctttgtcacgtcgagatcaacttctctgatattttccttcatcatttcctattacatctcacaactctaagaatatcttctctgcaatctcaatgtcaatcacaattcatcaattccaaacacaaatctttttcttctcctaactatcacaaaattagatgagtgtttatgattagaacccttgggttccatatatactatctcattagggtttagattttgcttgtattctcttaattttgtttgattaaaatcgatttcaaggtttctgtaaataaataaatacaaattgaagaagaagaacgatggagaagaagcatgaacaatgaaacaggggcaaatcgtaagttggcatatctgaaagtttcttttttcaaatcccatctcaaaaatggttaccgagaggaagcaaatgtttttggtcgacggagtaacgtggtggtggtggtcgagaaagaagaaagaaggagatgatacagatgacaggggtaaaacagtctttttccctagcacaaagtactctttttcaaaatccaacacagaaaaacctaaattcaaagatttggcaaaaaaaagccctgttttgacaataaaccctttaattagttgaaacaattatagaaataaaaggaatatttggccacaaaataaataaatagttttagcaaaggtgtgttttcccctgtgcattactcaatcataaattttacaaaaatttatagtcaatgagatccataagaatacagagaaattttgaattggttagaaatatgtttgtttttttcgataacttaactaacaaaatcgaaagtcttatgaattcaaagatattatttagtttccaataattattttacttttgattttttttttgttgaattaatcattaatgacaaatggacctacgaagaatgccatcaagggtccttattaacaagtaccaacaaatcaacaataggctcgtactcctttctaatttttcggcacttttttgtcaacaatatttcagcatttatatacatggttttataattaaaagacaaattattatttgtaacatatgtctcctactacaccgaaaattaccggaaaaaaaaacataatgtacatatctcaaaagacaaaaaattaaataaaaacttcaatttcaaagtagtaactttcattttaacaaaaaaaaaaagtagtaactttcattcaagcatataatttttctgtaagatgcttcataactaacttttaatcattttcattaccattaagcaaaagctataaaatcccataattcatatacataacaaaataacaatcttccatcaaataacttttatctatgatattaaaaaaaaagagaggccagatttgggggtggtctattcatactaaatgcaaaccatctatcgactaccagactgcattaaatgtaacaagtaacaacaaccaaaaaaaaagatgaaaattcaccacatcaacagtattggaccccactttcttcttaatttttcattcaattcttctcccaaccatctctttgctgtcttcataactatctcatttcttgtacgaatcaagaattttttttcatttttgaaaccaaataaataaataaaaatctcattatcttgttagagataaaaagagaaacaaccaaaaagaaagaagaagaagtgtttgttctgtttcagtcattcaagttcatgagaatagaaacgagtccaagtttgttgttcatgcaaaattctcatgactctgttacactcctgaatttcttctacttatattccattcaataacttttcttcttctatcagttcaacgttcacacactttttccatttcctcgacaaactcctttttttctctcacttttctcgaattctttttttttttttttctctcaacgaaacataaatcctctgttttggtttaagag

SEQ ID NO: 70 - DNA, 3000 bp, Arabidopsis thaliana
  promoter (1)...(3000): very long chain fatty acid condensing enzyme (KCS1), wax/cutin promoter, pAtKCS1, At1g01120
tatgcttaaaagttaaatctcttttgcagttctacaaaaacatctggattggaggatgtagtctggaatactgatgcagccgttgaagaacaaaagcaaaaaaaaaaaaaaatagcaagttgttcaattcaaagtttttaactaaagttgaatgtataatgaatagcaaaaaatgctggagttggcaaaatagaactattctttacaaaaagccaaacctagaagttgctacagatttagatccatatgttagccaatagccatatgcgatcatcctcaaaactcgggttggcttactttgagttagtcagacctatgagtcaaagttcaaacaattcaattagtcaaaaatactcgggaagttcgatatttgagtatagttgaatacaaagttgtcactttatggctacggttggcaaagcgttacagtgacacaatatcgacaacaatttggaaacacacaatgatagaataatagagagaagcaaaaaagttatgttagctataaatctacgaaccaagtatattctgagtataaagttttgttttgttataaatgggattggttaataatttgccaatcaagtagtgattttactacaaaatacataatgctggatatatagccaagaatatggatatagatggtccatgtctacgacaaaactagcaatgaaattgtggcggataaaaagacttgatcatttgtcgctattatgttgctatttgttaatccatagatttattcaaaacaaatgactacgatttggcaacagaaacaattgacagaatttatttatctggtgatatgatgatattgacattttcaatatcgaattcgtagttggattcggattaatcgtgaccaaatatttataattccatatattagcattaatctttcttattcgagattaagaaaaaattcgagtaattaaaaaaaaaaattgtttgaaaaaccattaaaatcaataatattgtattatatacagttatatactgaaattcaaatacaagaccacgacaaaatgtttactctaatgtttcaatttaatgaatcattcggtattttgaagcatgttagagcctggtagtactgtgcatgttatacagccaatatcaacctttttcgctagttttatgtaaggctatatcgtttatttatgtagcaaccatttaaattgttagtcctttttaaaattattgcaagatgtgagtgtgtacattcatacattgatgacggactggtttctagttagttggtattaagccgaccaacattaattgttggtttatgtctacacatgggtactagtctaccatttattatcatcattatttcatttatcttgcaaattaatactttgatctgtttattgattaattctctctattgttcattatgctgtacataaacctaaatatatgaattattagcatctgatgaactggatctttccaatattgaagtttgagagttggtatgcgtactgttgaaacatgtgtttcatgcagtaatcacgatattatggaaacgacgtcgctgccttttgtctttgttttctttttctctattatttcccagtaatcacgatattagaaatgatttaactattaaaagcattacattttaccaacaactttatcccaatgaaaacaaaacagggacaataagtccactttgggacctcaaatccgaacattttatttacctacaaagctacaagctacaactacccgtccgaggtctattttggacaccttggcacaatcaatatgaaataactagaaaaatactcgaaaactaactagatatgcaactccaaaactaattacttctttatcagatttataatatgaaataaattcattatgtaaagggtcccttatataacaaacgtcttaacgaagacagcaaatttataaatgacaatgactacaatactggaacagctaatagggatggtatataatggagaaacaaatcgaaatgtgctgctattaagaagtcatagtaattcattatcatcaatttaccatggcccatattaaggagtttgtatgcatgtgggatacacatttatacaaagaaataacaaatttgaatatttgggacacgctttcgtctacccttgttcttgcaatttggacagtgaacgcttctcatgaatgagaggtacgtttctcgaacacgttctccctttaaatttactatttacaacatattatatcaacttacccgtcgctgacccagtgcatttgcactacgtgcagccaacctgcttataatattcaattgatatataattttataacttgccctcactcaattttggataacctacatacacttgctaataaaaacatcatggatgtctaaaacgtttaagtttaattataaggaaatatataacaaacatgtcatattttgttgtgttgtagtggtataattaacaagttatgttgtttatcaaaaacttcaaaaaaaaaaaaaattaggttacaccaaaatagaatgttatgatgcccaaatatatgtgtgaaaaaaaagataaaccaaatttatgatctaccatatgacttatgagattcagctaggttttgttagacttttgtaacttgcatttcgtgtgaacaaaacatgaaaaataatctgactacttaatttaatatcaaggtcccatataagtagttgagctaatagtattatctcggaaccacccatcattaaattcgaatattattccatcttttttttttttttgttaagtcattactattattaatctttaaaatatttttatctttcttgcactctatatatctctccatccctacttgccctcatttcaccaaaatcctcctaattcaccaattttagaattcccattctcattttctctctctttctatttctccaaatttgcctaaagattttacattttatcttcaatccttccttgatttacgtttgaaatatttcgacccaaaactatactg

SEQ ID NO: 71 - DNA, 3000 bp, Arabidopsis thaliana
  promoter (1)...(3000): very long chain fatty acid condensing enzyme (KCS2, DAISY), wax/cutin promoter, pAtKCS2, At1g04220
cgttgcgtttcataaaaattgtaaacagctttccaacagacttttttttcttaataggctttaaagcccaacgtcataactgtctttattaaacatgataaacggtagcataaaatctagacgaaaaatcaacattgttagacatgtaaatcatatgttaatagatttttgattattgggtacagaatttgtggttgttatagctacatgcatttatatatgtagtactattcaacttttcttgttgttacatgatttctatacgcttgattcgcattaatcacacttgttctattcatttgttccttgtttagctatcaccattcgatctcgtatatgtacccaacccaagtactgagtaactatttttataaatttatccaagtacgagtgaatcaagtatttatttttttagaccaacttttattctctacatatacttgaatcttgggatacgtataatataaaccaaccctctttagattttaggattgtatttttgtgcatacacagaaatctgagcatagacaaatggatagaaaccacatttgctttatttctatagagtttggacattttttggctatgattttgtaaaattgttgtgtgctccgtgttagcgtttgccgaatgtgacactaattttgatcgaacaaacaaaaaactgaacataaattaattaatttgcacacatgtttaacatctataaaaaaattaaaaaaaattgcacacataaatatagacaaatgtttggaataagtaaaacatgaatccaagtgttattaaaatcagtattttgttactacaattgcaccaacaaaattgtatgttcaaaaatttagcgcagtacgaatcattaataacttgtccctaactactaactatattcagatgtatgcctaacttgtaaatgttactcatggttgagtagttgaatgttgaagagcttacgttataattaaatgctcgctttgattgatgcaaacaatttcttcactataataagcgaaaataatagaaataataaagatggaaaactaacaattaatagtagaactatatatatatatatccacatataaattctttttttttttgaggggtggtttaaaactagctatttagctggatgctcggctattcggatttgtgtaaaatacttctaaatattgagcaataggtaaatatagtgaatatttaaccatgacaaacaataaaacacacacacatcagaggaaacttgggaatgaacgtgaacaataaaaaaaaaattaataatgataataatagtgggcatagagatggttcttcaacgaattatttcttgcccaagtagcaccgtttggttagaaattcttcgacatttatagttcaattaaaaattactactccataattttgggtgacttaccacacaatctttccacaaatcttcgacacgcaattcacaacagtatcatagtttattatcacactttagtaatttatgccaaacctcactacgcaagcaaactatgattcattagatgtgtggacaattacgacgacagcaaaaaaataatatgtgtggacacacaatgacaaactcacattgaactatcttgaaataaatttatactaaatcgtagcgaatatataatcagtaaatagaagttaaactgaagatcataatcaactaaaatgaatatcgtaatcaaattgatgataataatgatttcagacacaataatggtgacggtgttgatgatgaaaaggatctgtggcataacaactgattgaattcaatgcatcttcatgggttttattccgttagctttatctttcacgtctttatattctttaaactttgttatgttattgacatttaaattcatttgtatgcatgttatgaagagatcgtataactacaaaaatataaaggtaaatctttcattttaaaaagaaaatgtttctatacgtgtaaataattagtaaataacacatatttcctcctgcgcgtagcagttcaacaaactctcttcttcgcgtagctagaagctgcaataacataaagaaatgatatatttataaattatgtgaaaatgaaaaaaaatattagtccgcaatatccacgtatcattatgcgccacgtaaacaaagtggacccagaataacccttgtttccagtagaaggaatcaatcagtggcaagaaagaaaataatgaatttcattaaatcgccactctcgagccatcaaagtatcaaacaattgattggagttagttgtatccttcgcctacaaatttttccttactctgttttataagtatataatagttccactaaaatcattttggatacaacctcaatagatctcagcgtattgtttcctgtatgttcaatgaatccatcctccatgcaatctggagactggagtataaaataacacgtatggtatggtatttatttctcatagctagttccttaacagttggaagaatttatacatgacccggccctttaaaacctatccctactacaagacatttgggttactttccatcgacttttgaatgtgcatcaggcatgaaaatcctttaattatgcatattttataatcaatgcttaaattactataaacacaaaaattgtagtgatatattagaaagataatttaaattgttacattgaaaagataataaaaaattataaatagacatctgatataaaaatggatgaagtatagcatattaaaaaaacatatgtttttggtcaaaacagaatcaatgcatagttagctcaccgctacaacaataaccatagggactacgtaccatccataactacattttcttaaattgcatcctctttctaaaattttgcctataaattcacaataacacttcaactttttaggccataagttatctctttctctacaataagcaataaatctcacctcccttttttttttttttgtctcgctacttttgattatcatttaaaaccaaaaaacctacc

SEQ ID NO: 72 - DNA, 3000 bp, Arabidopsis thaliana
  promoter (1)...(3000): acyl carrier (FATB), wax/cutin promoter, pAtFATB, At1g08510
cactatccacattaagatttcaataaaatgtctcaaaatttattagtatgaatttctaatatgatatttattgttttataaatttattaattaacctagaaaaataattaaagaagtttttcttattaattggagagttacgtttttattcaatttatatcttttaggaacaaatagatagcgaaggattaaattttgcataataaatcatgaaatctcaaggtttaattaagtcaagagtatgggaaatgcgaattcaatcgcttggatgtagtaaacaagtggtaactaatatagaccacaaacattattagctttgactataaaattgatcctcaaggtgaaaagtaggctaactcctataaatctccaaggcaacatccttaattttgagagtcattcataagaagaattgtgttcataactttttttacttgatcagaaaataaactatgcaataagtaataactaggttttcaaaaggcataatcatctgtacttctttgtatatgaaaaataaatatgcaaatgcaactaaaggttttgaatcatcttttttgtttaattaagactttttaatgtaaaccaaattaaacacgatatatattcaaaatgaaaacagaattatcaacgctgctgtttctcctgacttaattcttgactcgtctccaagcaaattaaagcgtccaaatgagagatttaataataatcaaagataagtaatatcatcaatgacgaaatagtcaacataaaataaagtttattgtgatctagtcgatgtctactgtactttctcaatggttatactattattggtcccaggctcctcttgtagcgtatgcgaggactaataggctgctctcatggctcattttagaattgtaagtacgtttcgcttaagtctccttctccatatggctcttcggaagtactagtagatcacatgctctacaaagttttataccgtctccttcaagacgtatgctaagcatgcttgtgcgagtgtgcatctcccacacgtctctcgatcgtggtagttatctatgtccctagtatatgtgttgtcaaacttttattgatctacgcttgccatcatctcatgcatgcatgtgtctcacatttattatgatcgtcaaatttaaccacgaatatggagcaaacaagagacggatatggtccttgtaaagattggcaatcatagtcaattccatgaacctggtcctcaatagcttatcatatcttcttgttagcctcttatacgctaccaaaatgatagctgaaggcaaaattgatctctccaaactggtaattatatattgtgatgttcttgttgggaagtgtatctacctactctcctaaacatttggattggctatattgtttcgatttgaaaaaaataacacgttgcttttgtataataacattatttgtatagattacttggtacgtaaaattttgaagaagttaatttaaattatgttttcggtggaataaatatataaatccgaaggctgactttacacgttcgacaaagttttatggttaaactaaaaaaatgagaaaaagctagagttaggtttagtttaaatgtagttttcgttagtcttaataaatacaagtaagatagagattgatgcacatgtaccttgttgtctctgcccacttattattacacagcgtcggtgccagtattgacaacaagcttgctcacacattcggatatgtgtctttttctctccaattacaaatttgattggttcgatttttcaaaaaaaaatttccaagtccaaaggaaatttccacggaagcgcaaatcaagttttgcgtgctaaatgaaattcaaagaaaatttgtagtccatatgaataaaaattgaataaatttgcctaattaggttaaccaatcttgtaacaagaaaagggcaaaatgggaaatatagaaaatgaaataaaaatgtgtcgttgttgttttgaaactatggagaagaagaggagaggcaattatataaaaaccgactctcatatccacatatatctctctctcacccaccttatagaattttctcgccctatttttctctcaacaccaaaaatttgtattttttttttactattgtttaccccaaaaagtattgagaatcgcaaaaaaactgaattgtaaaaaatatttgagaaagagaaatacaaaaaaaaacaaaaaaaaagttttaaagaaaaggcgaaggagagatcgtgagagacagagaggctgccgaagaaaggagaatttagggtttggagacttttgttgaaatttggcgttacgttttttttgtatttcctcaacaaatttctcatctgctctcttcatattggtaagatctctctctctttcatttttttgttttttttgggttcttcttctctttgtgtaatttctgaatctcttcgtcgctggttcggattcttcatctgattgatgtttgattgaagaatgatgtttgaattacattttttctaatacaagtttttgtttttcttttgcgtttctacgatctggttttaccggctttagctttttctcgcttctgttctttgttgttttgtatttcagatctggtgttttttttcttacctgcatcaaattggtttctaccaaaacttcggaaacctcttttggcaaatgttgaatctttgaatacaatgacgatttacataatagtctcagtggccgaactggattatcttacaatttacgcaataacaaaaagttttttttttttttttttttttgtgtgtgtgtgtggtgtgttgaagatttttagtgtttgtttacttcgtttatggaagtccttttcctcttctgccatttttgtagttaactacaaattatacctactttaggaagatcctcctgctagtagctaaaagatgtagcatttattttattatcactcacttgagctaacttttttcgatctttatttggtggcagtgtctttgaacgcttcatctcctcgtc

SEQ ID NO: 73 - DNA, 3000 bp, Arabidopsis thaliana
  promoter (1)...(3000): long chain acyl-CoA synthase (LACS1), wax/cutin promoter, pAtLACS1, At2g47240
aggttggaaaaatttaatgatacattgtacgttttctaggttttgttctaaatgctcataaacctacttggatttggaaataaatgagagcttacatatatagaacaatactctatttccacaaaaattatttgctactcatatacaaatgtaggtttagaaaaaatccactttagcaaaaagagatgggaaattaatgaaaattcacttgactttctttgttttgtgagcaattttcgatttcaaagtaatggtcggacttagactttttcctgttcttttttgctgacttaataataagctgaaacttaacagttagaagttggaacaagatataaataaaaaagctaagttgtcaaacataaagttgaaaatgatttggtgatgtcaattaaataaaaagttgaaaactaatcatttgtatttgaccggcggttacttggaataagactaagaattattgtactttctatttaatgggtttgctaagttttttatcagatcattttaagcaaaatatcgataacttttcgaagagattagttgaaaatactaagcattatatatatttaaatatgatggatcagtatatatagttttgaaaatcacactgcaggatccgttggaattggtggctgagaacttttatgatcttcttaaaattttaatccgtaaataaattatacgagttggattggttcgcgtcttctaatgcgtattgacatctataataaaagctatcagaaaagttgctgatctttttctgtatcttattaaatatgtagacccgagcagagaaatgtggatcaattaataaatatcatgtacggatgaacaagagagaagaaaaaagtataataatactatagagcgaaaagtattgcatgatggagaaactctcaacaatttcaaacatgaacgacttcttacaaaacaatgtatctttagttgtcacaatctttgaaattctacaaatagagaagacggaaaaagatgaaaatgaaattagtgtttttctttggcaaggtccttggatctcttaaaagtgattagatcaacggtaatgttttagatatcctacatgtgcattgattcgataaaagcatttaaatagtgaatattacaaacaaaaatagatacttacatcatgaaatagaaacaaaatcaaactgggttgctacttaccagtaatcacgtgacggtaactggctaactgcaatagtatatccaaaacaactttaagaaatggatacgaaatgttttagttttgggaaaatgtcaaataaagatttcgtcacaaatccatcaatccagtatagaacacttttatcaaaatgattttgcaaattgattcttagagtacgatacaagttgcaaactggaaaaataattttgcagttgcaacaaataataataaatgattgtgcaaattgattctcaaattaagtaggaaacaagttgtagtagatatagactgtttttacatgatgttaattccaaaaggattcattgccatacaaatggttttctcatagaggacgtaatatcaattaatggaaaatagtagttgaagatttatagaagaaaaaaaaaactttccgcaaacaacactatatatatatatattggatcaaaaataaaaagagttaaatgaaagaaatacacagacctggcctgtatcaaccaactcatatattattatataaaccaacatccatttctcagctcctcatcaaattatcttctttctctttctctctgatcatttccaaattatttctaagctaagaaaatctttaaaaataacaaagcttctaaaataataatccgacctaccggattcaaaccattgatctgaagatcatctataaaccagtccttgatctataaactaaaataaggtcggttgcttaatctttgttacccttttatttttgtggttataattatattatcttcattttgtttccttttatgattaatcgatcatatcaggatagatatttcgttaagtttatagtttaaatccagaattttatgtttagaaaagagaatgggaagagttgaagtgtttaacgtctatgaatattcctcacgtcaagaaaaaagaaaaaaaactatgaatggtcctctctcgatgtccttacattggttagagagcgttgcaactacaatacatacatcactttcatcatatttattgtctttttcagaggttttcatatttcgactgaattcttcaatttgcaatattatgaataatagagaagatgatgaaaaaaggataaagagagtgaagccagggttatgcatgctctcacgtttagggcgtgactctaaactagcgatttagtttacggtattattaaaaataatattagtcacataatatttgtaattttagtcgaaattaatgacagaaaaatactagacgctaggatttgtacttccttgaatccttggaaaatatacgtatgtaattaatattattcattatcaaaccacaaatacggaaaccaagtttgtgtcaaatccaaatggagtagtttggtatcttaggttgttgtttatcataaatgagaaactttggggttgcactcgatcggtatggttaggtggaccggactggtgacaattaatgccattgatctataactgttagattataatctaaaggttccattgcagaacaattcatcaaactttaatatctatgtatttatgtatgttcccaactcacagaatttcacggaattgcaaaactatgataaattctgctaccttaatgaatacactatgaacttgactaaaaaaacaagaataaagtatgataaattccctcattttatatttctcttatctatttcacatttttgcttgaaaatttgtaccattaatctctctattcggcagtgttaaattttattatttaactccgtcggttggattcattttaaatttctcttcagggaagaaaaaaacaagagagagaaatagaga

SEQ ID NO: 74 - DNA, 3000 bp, Arabidopsis thaliana
  promoter (1)...(3000): long chain acyl-CoA synthase (LACS2), wax/cutin promoter, pAtLACS2, At1g49430
cgatggtttcgatgagcttaatagctccacgtcctttggaacagagtttgtccatcactttctcaggactgcagcaaaccactttgattgtgaccgtgttggtttcttcttcgaacttttggtctcttacttcttttgttttcccaaaaaaatcacataaaacaaattattattatgagtttttaatttcaaaccaaaagagacgtaaaaggagagaaagatataacaataacatacgaggtatgctcgaaagagccttcttgactttcgagaaattcttttcgttactaagaggctccgtcttcaatttcatccatgttacctagtttaatttcatcatataatgttctcatagcttttaatacaacttttgtaacaattagtagtaacggtttcaaagagaagcacaaaaaagaaaaagaagagagcgtttatttaccttctccttacccttctcggccatggctttgaaaagaaaaatattttcagtgtaattgcttgtatatactaacactactatgcagctatgctatatatttggagtttcacgagagggtttccaaggaaaaagaagttgaatattgtacaatttacttttctcttagaatgtataatttccatagctattattccatattacattgtcctaaaacaatgtaaattttcttttctttttttgtttaaagtttttcctatcttgtttttttagttgaaatttcaaatttccttttgttaacaaaaagaaaatattaccaaaaaacaaatgatggggcttagtgggggttctaaagagagaaacaaagcatagttctattcttttggaagaggactaaaccctgctgtttttttcggagcgaggatttacgagttttggccaagaactttcggttttttttttttttttgaatagtcctagaactttcggttttttaaaaaataatactaatgtaatagaaaaaaaatggtgtttcttcggagaaaaatgacaacgggtggcaaaccaccttcgaagctatcccttgagcatgtgcacgccagtgtacttaagtgagacattaagttccaaatcaatgcgaacgagctgagaggaggagatcccattacgactgtgtcgactcaaatttctcttcttccataagtaatagatcactgattggaaccaccttgtgatacaaaacattataatcccatttgatgtattttacagagattagatgagaaaccgtgtctgaccaatgatagtcggctagaatgtgaatgtgtaagaacacacaaaacaaaataaaccttggtggaaaaattattattcaagcgttaatcgtgagaagaaaataatattctttcttaaagtattgtgaaaacataaacttttcaaaatctaaaatatgttaaatatttatttgaatttactttgtagtttaaccgtgtaaaaactttttacctataaaaaagaaaaaaaaataatagggataagttttttttatatatacccataataattaaaacatcgttcaaatttggatattttccttataaaaagttaaagaaaaagcatgtttttgtaaatttaattcatagaaaatgtctgaaattttccattatttataaagattatagattcgccgaaaattaaattgttaaggctggggaagaattattgttcacgccaacaatcacgttatgacataagattcgaaagttagcgttaaatttgatgtttccactgttaccaagcaaaaaaataaacatgtcaaacaaaagaaaatggactacaaatttgatagaaaaaaatgtgaataaaataactgtagtcgtttatttacttagagttgtatacatattgactaaacacaataagaaaacaattttatagaatactataggtcttaaaagatagtatattttattttcatttgatgaaattacatatttgactatgtttctaattgaaaaaaaaaaaatttattaaaatatccataaaaatgaaatgataaaatttattaaaattaaatgggctgaccttgtaataatatagggagcaggtcggagactcagagagtgagcttttcttgctcgtccatttattaataatttcattaaagagaaaatctgtagagttgacactttttaaagtctaattattagggatatatacgtaatttggtttgaaaataaatatcaaaatctagctaacttgatatcagtatgggtaaaagataggagtaccttttgttgttgatttaattgacgatctagtgttaacccagagaattctaattagattagcctctttctctcatccgaaagttgaagtttaataagttaatctgatatttgtaaataacttgaacagtaaatcataaacaaagaaaaactgatttggttgcacaatttaattagtgaggtgaggtctatcacaatcactggttactatagtgataaagatcctgattatgacagtgactgtgagctggtgaggtctaagagtacaaaaacaaatgatctaagttatcaaactataaactatataattcgaaatatattaattttgttaaatccaaaaccaaattgcatgcaaatggtcagtttgtaaatagtctacgtttggtccaattactctttactcttaaggttctttactatattcaaacccactaaatctacttgcatataacacatagagacacaaaaattagtatttaaaacatttagataacaaacaaaagaaagagaggctcctaataaaggcgcaattaaaaaccggtcagaaatacaccaattgtgagactcaagaagttattgctcaactacttcctctaactcataaccacaatctccaaacttcaccaccgattcacagagacttttattaaccttcaaaacattatttattattccaatcttcaaagagagacactcacactccttatcttcttcattcctccatcctatttttcttcttcgccaaagtgttattcctcaactttatatattacacaa

SEQ ID NO: 75 - DNA, 3000 bp, Arabidopsis thaliana
  promoter (1)...(3000): cytochrome P450-dependent fatty acid hydroxylase (CYP86A4), wax/cutin promoter, pAtCYP86A4, At1g01600
acgatatgctttcttcatcttcttctgatcaaatcaatcgcctcgctgtttccgtcgagggaccctacggccctagttccactgatttcctacggtaattcacttaaatcacaaacagagaagttcaacattctgtttcttccgacacaagtaacattgatgctctgtttttcttccaacacaagtaaaatgctctgtttttctttaagtgcagacatgaatctctggtgatggtgagtggaggcagtggaattacaccgtttatctccatagtccgcgacctattctacatgagttcaacgcacaaatgtaaaatccccaagatgaccctgatctgcgcgttcaaaaactcttccgacctatccatgctcgacctaattctacccacctctggtctcaccaccgacatggcctcgtttgtagatatccagatcaaagccttcgtcacccgagaagagaaaacatcagtaaaagaatcaactcacaataggaatatcatcaaaacccgacatttcaaaccaaacgtctcagaccagcccatctcaccaatcctcgggcccaactcttggctctgtcttgcagccatcctctcttcttccttcatgatctttattgtcatcatcgcaatcatcacgagatatcacattcacccaatcgatcaaaactcggaaaagtacacttgggcttataaatcgctcatttaccttgtatcaatctccattaccgtggtgactacttctacggctgctatgttgtggaacaaaaaaaagtactatgcgaaaaatgaccaatatgtcgacaacttatctccggtgattatcgagagctcgccgcagcaattgatatcgcaatctaccgacattcattacggagagaggcctaaccttaacagtaagtctatttataacattttcatagagtaaaatgctgagttctaactctgtttattctattgtgtgaaacagagcttctagttggtttaaagggttcgagcgtgggaattcttgtgtgtggtccgaagaagatgagacaaaaggtagcgaagatctgttcttttggttctgctgagaatcttcactttgaatctattagttttagctggtgaattttaaattcagactgatgttttatcatagatgtttgggttacaaaagaactaggtggcttcgagagttcataactctaaacatgtcctagtactaatttatccgtctccggtctcctagtagactagtactaatattaaaatgtgaagcgatatatgagtcacatgttggcaggatttaaagtttgacagatctatatgcggtggatacgagttcggttagctgaaatttgtagaacaagcatttatgtcatgaacgtttctgaatggttttataatggtaattagtgaatggtttaagacattctttaggcagtcatgtagttttgtaatatcaaggaaaattggcttggctctgaatatgatttttttttctgaattggcttgttcgaatcctcaagatgattttttgaaatgtaaagttgcattttctgatataatttttttttgttgccttttataaataatcatcttttctttaacatttggttgccttttattaaaaatcatcttttctgattttttttggtcaactaatgtaacaccttttctttaacattttttttaaaaaaataaaacgcaaatgaagtcatggtaacccttttgactttcacaataccattcagtgacatctttcttacttaatattccgctgtcatgtcccactttggttaacatttgaggaatttcatcagtaaaaatcgaaaagatataaaggcatcaaaggagaaaccttaaaaagtcaaaatagagacacaagaagtgtttctttgtaggcttagatgagaagaagaaactaaggaaactgtattcctaaagtaaatactacttccttcattcctatgataatcaattattaaaagatatggagtcgcttaccaaatcataaaaccggtaacccaaatctaggaaattttattgtggaataaataacaaagcctttattttatttaaatagaacaagataaaacaccaaaaataatagctatgttctgaagtcttgaccaaactactgatacgggatctcacctagattacttacaatgtaggtgtaaaccgagtttttaaccaaactaaaacgaattaagcgacaattagttacggaagcttaaactctacatagattgatagattaaaaaacccttgaacaaaaaaagaatccaaattcagcttgaagtagattcaaccaaaccgaaataattttttaaaaatatgaattttgtttcagtttgaatttcatttgattttccaaaaattcacaaaccaaaccaaaaactgaatatcacttgtagctgtacctataaattattagagcattaaatctatctcaccaccgccaaactcaacgtgtgttaatcttttaaccctaaacttctaaattaaaaaatagacgacttttttacttatttcttcttcttccccaccatctttttttgtgctctatgttctcaactaatctcatttaattcaccacatacagctgcatcaaacatatatatatatgcatgtatttatgtacttatacacatacatacatatgatcatttaatgaaattcattaaatgaaactattcctttcgctgcaaaattaggtaccagtaaagcataaacaccactttaccacttcttgaattccaaatctgaaagctctgtcattatatatgtataaaccaatttaaacatatacatgtctcaccgataacaacggaggttcattaatgagggtttgattatgatacttacgagtgacagattgtgaatatcaaagagaagcttcttcctcccttttttctccctataaatttccgtagaaaaatcattcattcgcatctcttctcttctcaaaaatcaccacatttctttacttctctgggaaacaataataaaagagctac

SEQ ID NO: 76 - DNA, 3000 bp, Arabidopsis thaliana
  promoter (1)...(3000): cytochrome P450-dependent fatty acid hydroxylase (CYP86A7), wax/cutin promoter, pAtCYP86A7, At1g63710
cttccttttatagctccaccttcatctccagcttcatttttccaatcagagccaccttctgctacacaatcacctgttggaatcctctcttttagtcctttgccttgtaacaaccgtccttccatcttcgccattggaccttacgctcatgaaactcaattggtatctcctccggttttctcaacttacactactgaaccatcttcagctccaatcacacctcctcttgatgactcatctatctacttaaccaccacaacaccttcttcacctgaagtgccttttgctcagctctttaactcgaaccatcaaaccggtagctatggttataagttcccaatgtcttctagttatgagtttcagttttaccaacttcctcctggtagtccacttggtcagcttatttccccgagccctggttctggtccaacttctccttttcccgatggagaaacctcgctgttccctcactttcaagtctctgatcctccaaaactgttgagtccaaagactgctggtgttacaactccttgtaaagagcagaagattgtaagaccgcataaaccggtttcattcgatcttgatgctgatcatgtcattagatgcgtggatcagaagctaagaacaacgttccctgaagcatcatcagatcaagaatcaatgaatcattcgtctctcgggtccaataaggaattcaatttcggcacggatgagaaacatttgaccgttgatgaacatagatcagcttcgccgaagaacagcaatgattggtcttttttccctgtgatgcagtcaggtacactaagctaaccttcatcagaagaatagaaatctgaaatttagatatcgattcggacaaatatcttgttcaagattcaagaacaattatagaatttttagatgattctgttcaggatcttaaggatattttcttgtctctctttttggttttgtaataaatatttggcatcgttagttgttgtatatggctactctttatgtagttttttgtttttgtgaatacacatttgatcgcatttgtaaataaaatttaatcagtttcttcggagaaattccattaaatttataggtattgtttactatttgatcttctgttctgtgtattgttgtgactagagttttgttattgttagagccaataaaaggtgagatctatagcataaaggtagtgaatgtttctccttatttgttatcttagattcaaccatgatatgcaatgtaaaggagaaaaagaaaaaagagagtaaacatttgagtatacaattaacaagcaactcaagactgttaacaagttttattcaccaaatcgatataccggtcaggttttataagaaacatcacatcacaaccactaagtccactacaatttgaagctttgagccctgtaaacaaggattatacatgacaagttagaatgggccagcttaaattactaagtccactctcagcattccgcaagcccacttggaatccagcttcaagttctcataggcgcttttggttcaattaatcccacctaaaaccagtatgcaattggagagttaataaatcttgtaggtttaactcttgttaggaggataaattagatgatttaaatttccttatgtctttttaaaaaaaaaaaatacaattgagtcttgtcaatatgtatctcttttttttttttttttttttttacagcaacgttaactactagtcagcaaaaaacacataggttaaaatatgtcgagtctcataatgtgaaaacaaaagaaaatacaaagattgaaaaagaaacaacgacccccacttttaaacccaattaatgccgtattttaagttgaagtgccgctttcctcaaatctcactattgtttctcttattctctatcattcatatttcatagccaacaaagattatggtttagagcatttactgattttatgtcaattataaacatgtcttttttatcaaacgttgtgaataatcgattacttattatatggtgctatttataaacttactgcatttctttttcttcaaatattccgttataaaggtgttgagaattttgtttataaaattttagaattactgattactgtacatacatgtgtttgtggtattttgttaattattgtcaattatcaaaacacgaaatgttgtcttattaaccctttttctgaattattgtgttcttgtggaggatatattatataggtcgacataatttattcggatcacgcgtggaaattatattttgccaaaacgaaagtaggaattatatgattcatgtatcatgttattgctatttttatttgatactgtattttttataaataaagttttttggctcaccaacttaagtggcactaatggcattggcccctttaagctgtaagttaccattaatttatgttgccaaaatatatagctgtcattatgttgccttagtatgaatatatttttctatcacacaatatcaatagatatatggttatgaccatatcaacttgtcccatcaacatctcaatcaaaacatttgacattatataattaaccaattgattttaggataggactctacaaacttttatttaaacaattttcgcctgaataaaatcatgtgtttaattaggaaggtgattatgcacaaactcataagtgaggaaataaaaggttgagatatagtaggtgaattaatatatacaatattaggttattataaacacaatgacaaccacaaaactctacacaaacaaacacatgacatgcaaatgcaactatacgtccccaattttttggttgggaagaataatcaacaacaaacttagttgccttattaattgcttatacttttcttttctctttttagatttcattttcacattttttaatctataaaacattaatatgattatcttccatttcacacacacactcacacttcaattctcttcttatagattctgctctcacctccagactaaaatataaaaa

SEQ ID NO: 77 - DNA, 3000 bp, Arabidopsis thaliana
  promoter (1)...(3000): cytochrome P450-dependent fatty acid hydroxylase (LCR, CYP86A5), wax/cutin promoter, pAtLCR, At2g45970
ccatttcacaaagatggtaaaaaccgtaaaatgctgatgaaatcgcaaaatcattttttttactaccaaagagaaccattgttacaccgatacaagctttagctttagcatgtgtcgcagtagtcgagacaaaatataaatccgtcgttctttagtttcggtggtaaacgagagaataaatgactaatgatatagataattaagtaaacatgtgattatgcgtattgaattattagcctctagagtggttgagtgttgtctgaattactattaattaccatgtgaataagcgacgtggtaactaactatcataatgattcattcattattttagctacttttcaatatgattttttttatatctccttttgattctatatatggtggtcttaaatgccaaatgagacaagtaacaagtaaagtgaccaaaacaatttcacttaaatgaccagttttacgtgggacaacccacggaatctaaagatttctatgttgtttattacttaacgtgataggttaagtttgtttgttaagtcgtaagaatcgtaaccatggactcattaccattaatgtgccaaattccgaatagattttgtagtcatataaagtcattgcgtttattcaataaacaagtcatagctatcgagaattccttcattttattttatttttttggtaaatagtgcatgggatggatatacttgatgcacctaatctaactattttattgtctattatttatgtaacttcccgtacgtaactgtcaatttcaagtataaatattaattaatttgtaaagatattattatttaaaatgatctacaaagtgtattgtatatgtttttattttgccgttgatgggaaggtaacctaattagataactttatattctctatcgatttgtgtcctttgtcttaagttttaacctaatattgcatatttaaccacataaatacactaacatgtgtaaacattcacattctgcaaggatttttttgtttttaaaagaacttgaaacaaaataaaagaaaaggatcaactgaaaaccaactgtcaatcaagttcatttaaaactcaccttgtttcatacagctgtaatgaaaaataatagtaatggatttcgaagtattttaaagttccaaccgggtattctgcaatgcttggtttgaaatttgaaaaagttgactatggttggtcaatgcattcatgctttgatgacaaaaatcaaaattatatatataaaaaatagttttcttccttcacaattatccactatagggtttatatatactatatactctttaattaattctccgatagttgttccttttgaaaagggttgaattttctgatagtttcgttaacttaatcgtttttcttctatgcattaatttttcgaaaattgaactccaatgcagtacatgactacatcgtattttaatattttcccacagcttctaataatattacaacggggggtttaaattcaaaatttaaaagattttaatcgtcgacatgtgaaaatgtagtattaggagtgtgtttatatatcccatgtacacatcacgagttctcgtatgagtatgtgttggttcttacattaatcaatttatcacgatcacgcattaagaaggcgacacattattatattgtagacattgaatacttgtaacgtcctttttaaaaatatattgacaaatatgtcaccaaacccaaaagcaacctacatatgttgtgtagttgagcaaaactatcattggtgagtttgttcacctataccctaacaatctcaaatctaaaaccctaattactcatccctatactctattgtatcacaaaaataggattctataattttatacacgcacatatactttgtcaaagcgtatcataaaaaaatgaaataaaaatcaacgaaataacgtgatatggctagtaatatagtacgtagtcttacgacaatagtttaacttatacgtgaaaaagtgggataacatgagttttcatatttttgtcatcaaatgatatgaaatagaataaccgaacatagatcattttttcactaattgagaagaagagaattagagactatcgactcgtacgagtggtgaaacccctgtcattttgccgttatacaatctactgaccatgtccatgactaataatacatctatcaacaaccatcatgtcccttgaaccgacaccgaattacaaaaccctaacttaatatcttcaaaacatgcaattaatagacacgagaataagataaaatgaggaggcaacatcccatgcttactttgtgacttcttttacacgattttctaatacattttaaaaatactacttgacatctctccatttttggggggttttgaattaaattgtatatataaatggttcatgcttggacattgaaaacctgtgggtcatttagtcatagatctctctctatcttccttcctcctcctcttactaggctcctcaactaaacgtcttcaatgctctctctctctctctctccattcttttacgacctcatagacttgaaaatttaccattctatttttcaaaacctttatattgatgagattaatatataaagtctccaaccacctagctaccagcctagagcaggaacattaatggtggtgcacaccatctcatgcttcacataccctaaagttcttcactccaagtttatgaggagatctagagagataatcatatagagaaagagagatctccagagaaaatccattgaagggaaaaaaacagtctgtctttcataattgctctttctataaatcttctctcttgtgttcttacctttcttctaaaaccattctctctctctttaacacttcatcactctttacggaaaatttcttattttcaccacctgagccatctctattttcgtcaaaacttctcaacttttgtgccaaaacgtcatttcttctgagggaataaacacaaaagaacaattttcccggaaaatc

SEQ ID NO: 78 - DNA, 3000 bp, Arabidopsis thaliana
  promoter (1)...(3000): very long chain fatty acid condensing enzyme (KCS10, FDH), wax/cutin promoter, pAtKCS10, At2g26250
gtcgtgtttcgtttgtggattttgttttctcatgatttttaaaatcccatgtttacacgatcataacgtttcgtcaattttaaaacgataactctataagtaatagcgtgtaccttcatcgtatttctttcgacgtcgtaattatgatcaccattcaccattttccttcttttttctttttagggtatataacgcaactatataaagcacacgtacttaaagaaacccatttgggcatgtgttgtccttgctgtggatcacatgcataagtctgctttttctttttaatatgaattgtttttgacttcatatataggaccaattcaaacatttatatttaaagaatattttactcagtattattactttcttttgtaatgatttacaattttgtgccactcgtatgtatagcgttttaaagaggttacttaccagtagtttttgtccaaattttatatgtgaaataacccttctcggaaggctaccacatttccattaaattattggaaaacttttacaaaatgtgacaattcgatcggaaggctactatctcataggtattgaggcaggatagtcactaagttaatgattctgcatcggtcacaaacgtggtgatcgacgtgaaaagattgagccctcgcaaaagtgagatggtgctttgtcaaacttttgcgataagtgatcatgataattacaaattaaacttcatttttgccgtttatgtgtcacttaaaattatgttttattttagttttcttaaatgaaaaaagagagtttatatatatatatatatatatatgaatcaaaatgttagttagtggatcttttgattctgaaaaattgttggatatttgtttcctcgcttaaattggtatttatagtagagtttgaatcgaggatttgaataggttcaagaattattttaccctttggaagcgtcatctcgctttgagttctactacgatgttatggttagactcccacggtgggagttcccatttactcttaaatgcaactgaacgggctttactatttgatgcaatgatacaaagaaccttcagatttaaacaatgagacgatcgcaacacaagagaataatgttactgatccttctacaacaaacactgcaccaaggcctagtttgcttgattgaatgaagtatacaaagcatagacacttatcacatttaaagtatttgtaatatggcaatttcgtatgtgttaacacatttctcaaattttaaaaatcgtttatatggatcttataaaatatggtagtaataatttaggtgggggattgggtcattatttatttctcttctattttgctactgcattaactaatattaggctaaaagttccttaaataataaagcttttttatgcgtaatgtagccgccctcatttatataggtctcaccaccaatcgattaattgtaagtaacagaaattgttgattatagttaaatgagtcgttgataatttgtttaaatttgtaaactcttcaggcaaaatttatattatgtgaacaaaattgccatatatttcatatcatgaatgaatttggtctaaacatactccatactgtcaaggtttaaaaaacattatattcatacaatcataccatgaatgaatttgtgtaaagctgtaaactcttcttgcatcctagctattttcctcttcttcttttttctttttctgactagtcatatagattttttttttgatttttatttgatcgttggagaatcttcaaaagatgactccactcatcttttcaaaaactacctagaccatatacagggctctccgtctacaacaattagcgtccggaaaacgtaaagaagtctacaacaattagcgtcctcgtggatcagtatcgtgacatttgtgtcatggaacctatccttggcagtcgaagttaggctcactcccaacggtctaacttctaagtgctcactaaaatatgaaaaactaatgttctcgaacaaacaccacctataatgactcaaccctccataaaattcgaaaactgatcttaaacaaaaatatatataagtgacgtaaaacataaatttatgtatatctattaaataataaattagtgaagtaaaacataaacttaatcgcataaaagtttaactttattttgcttctcaatagattttgactacataatagacgtggattttagtcaaacacaagcgatattgcaaaatttccgatatatatatatacacgtctttttcactaatagaaaagtaaacatatcagctcatcttttctctattggcagttctcatcatcttaattgaaaatttatgtttccactttttttagcttagatacaaactcaactttgtaaaagattttcttgttgcatattaaattttacatcacaacaaaaagaaaaaaagaaataaacaaaggagatcaaataggttgtacataaattaagcaatcatacaacatcaaatcaacagctaaaaagttcagtacaatctttacttccgaatttacttcattgtcttgacatcatgttctaaacaaaaaccaaaccaaagttctccacaaacctgtcggtttttaaccaaaccaaagttactagcttaattcaaaaaaaaaaaaaaacagaactgattcagaaaccccaaattgacaaattgtcaaattgtcaaaaagtggtcatctttatcctttgacatctggttagtataaaaaattgtaataaatgcaaacataagatccaaaactacaccttattagaacggaggaattaagagtgacataactcactccaactacgaccagtacaagtagttggcgacattaactacctctcaccaaccaccaaacccaatccccacaatattaccattactctcatataactacacatattcatatttacattttttgccaacacaactccttataagatatacacttcatcaacctatagatctcactcacataatcaacctacaaaacaaaaacaaga

SEQ ID NO: 79 - DNA, 3000 bp, Arabidopsis thaliana
  promoter (1)...(3000): very long chain fatty acid condensing enzyme (CER60, KCS5), wax/cutin promoter, pAtCER60, At1g25450
ggaaaacaaaaaaaagcttcaataaacataagccagtttattttatcaaaaatgttatgacaaataatgtaaacatgagatatgttttgaccagattgttgttgtccagacgaacagaaactcgagatgcgatgtggaagactccatcaacaccgttgactgcttcgtcaaagcttccctctatcgttagatcagcttcgaagatcttcaacctttcttttgctccttttaagtcccacaagaaacccaccttttcttcatcttcttaataacaaggaaagaaaattacagaatcatttaagaaaccaaaaaaaaaaacttgtggaagcaaacctaagaatctttggaggattctaggtaaagtacctgagtctctaacagttgttcttacgtaatgaccaaattctagaagtgacttgataacatgagaggctataaagctggttcctccggtaaccaagtactctgccattttattaggctcctctgattttgtgtaacattgacaaactagatcatgcgattagatggtctaattttattttattttgtgttagaaggatgttcaatcctggttgatttagtttatgtttgacttttttttatgtagtctttgaataatagtagttacatctaactttcataaagacttggattagtataacctaattataagctttgggcttgaagcaaatataatgaactgaatgtgggcttttaaagtatccaaagaggtttatgaaatgtgatatattttttttggtcttcaatctcttgaaaattggttagcaatccattggcagttgaaggctctctcagagaccttgactagaaggcctcaaaggcaaaggaaggtggaaggaaaaatcaaaattcccggagctgaaagttgacacaaaggaatcaacctagttctttcttgtcttagcttttttgaagggaaatgaaaattgacacaaaagaaggtggaaggaaaaatatgatgcttgtcctttattggacatatcattttgcagaatatatattcttcctagcattttgcatgcattgtgtctaggttgtcatgttgtggctggtttactaagttcctagtacaatgaacaaagcgccagagctgaaagttgaaataacaatcgtcaacatcccaaccgccttaacattaaaaccaaccaaaaaaacaaaaacacatcccaaccgaaagcagcaatccaggaagattagtttatgtaaatgacaaacataaatatgaaaccgtcacatagttgagagtcgccgtgaatatttactttttaaataaaaagatatggttagccgctggttggtctgacaccccatgtatcattatactcattatccgtatgaaggaccattttttcatataaggatatacacgtttgtaacgtatgcagagccaacaccaagtatataacttgtactgtcgtctctgattctgttaaagcggttaactagattattgactatgataattcaatgtaacaccaatttatgccccggacaaaaaaaaaatggtgaaaccaaaatatttgatttgcatcccagttactatttccctgcaatgatatgggggcggcggtttggagatatcgccaatgccacaatttgtcgtaaaaacagttaaacattttactcactagtcactccccacaaaaaaaacgatacttagttccactctctactactacaaaacttgtatacattaaaaaacgatttttattgagtagacattaatgatcggcttataagtctaaacaagtaatgtgacagaattcacgtgaacaaatgctcgagtgggatgtttttattgcttctcaagttggtgatctttaatatcgccaagattaggttgtgcattaaatttggattactttttataaattaaatcaagatatggatatgataaactttctctcttttcttttagttaacatactttatagactttatactacattagattaattgcagatttaaacaatgtttaaaattacaaaaacgttaaatgtcatattttccatataaattttgttttacgtaaaagcaatttacatgaattttgataaaatcatgaaaaaacagaagcggtgtccaagattggggatgaatgagaaaacaccgcactgatagtaactgaaaagaatgtaaccagtctcacgatggggatggcggagagaaagagagagacaagacagtagagaaaagaaggtacgacggagagatgaaggttggacagagagaacaaaacgagaacggcaatggccgggaaaaaaggagagtagggaggaaaaaaaaaagaattttgtttttttagcttttgtagggttttttgttagtcgtaaaatataaattataatatcaaagaaaataatgagttaattttaaagaaggttagatgatatttttcacaagtttttgttgatatagtaaacccacaattttattttgtcattcaaagtaaattttcaacaaaatatagctgttgctggtcacattttaacgggaaaaaataattcttgtacctggatgtataacctctgaaccttgtattacaaatttacaaaacacattgatctcaatcagaccgaacatgtatatcgagtcaactgacaaatctcttttcctactcttgttacatattctttctaggaaaaaaaaatgctttcaggctcaatgaaatgaattaaaacagcaaaaggttggtaaaagtctttttccccataatcatttgctccataattgacgtttgtctggcaacaactggaaacacagatatagaaaaaaagattggacagtaaatcataaaaaaaaaaaagcaaaattaaatagaaagacgaagcgagagaaagagcgttgagtggcgtgagagtttgagtccgaaaattaactcctctcccatctgccaactttcctctgtttctcctttatatcccaaacctattcttcctccacacctcatcataggcatagcaaaactcttccaaa

SEQ ID NO: 80 - protein, 352 aa, Arabidopsis thaliana
  MYB domain protein 96 (Myb96), At5g62470
MGRPPCCEKIGVKKGPWTPEEDIILVSYIQEHGPGNWRSVPTHTGLRRCSKSCRLRWTNYLRPGIKRGNFTEHEEKTIVHLQALLGNRWAAIASYLPERTDNDIKNYWNTHLKKKLKKINESGEEDNDGVSSSNTSSQKNHQSTNKGQWERRLQTDINMAKQALCEALSLDKPSSTLSSSSSLPTPVITQQNIRNFSSALLDRCYDPSSSSSSTTTTTTSNTTNPYPSGVYASSAENIARLLQDFMKDTPKALTLSSSSPVSETGPLTAAVSEEGGEGFEQSFFSFNSMDETQNLTQETSFFHDQVIKPEITMDQDHGLISQGSLSLFEKWLFDEQSHEMVGMALAGQEGMF

SEQ ID NO: 81 - protein, 333 aa, Arabidopsis thaliana
  MYB domain protein 94 (AtMyb94), At3g47600
MGRPPCCDKIGVKKGPWTPEEDIILVSYIQEHGPGNWRSVPTHTGLRRCSKSCRLRWTNYLRPGIKRGNFTEHEEKMILHLQALLGNRWAAIASYLPERTDNDIKNYWNTHLKKKLKKMNDSCDSTINNGLDNKDFSISNKNTTSHQSSNSSKGQWERRLQTDINMAKQALCDALSIDKPQNPTNFSIPDLGYGPSSSSSSTTTTTTTTRNTNPYPSGVYASSAENIARLLQNFMKDTPKTSVPLPVAATEMAITTAASSPSTTEGDGEGIDHSLFSFNSIDEAEEKPKLIDHDINGLITQGSLSLFEKWLFDEQSHDMIINNMSLEGQEVLF

SEQ ID NO: 82 - protein, 355 aa, Thellungiella halophila
  MYB domain protein 96 (ThMyb96)
MGRPPCCEKTGVKKGPWTPEEDIILVSYIQEHGPGNWRSVPTNTGLKRCSKSCRLRWTNYLRPGIKRGNFTEHEEKMIVHLQALLGNRWAAIASYLPERTDNDIKNYWNTHLKKKLKKINEFGEEDNDGFSSSNTSSQKQHQSSNKGQWERRLQTDINMAKQALCEALSLDKPSSSTLSPSSSPLSPVIVPQNIPSFSSALLDRCYDLSSSSSSTTTTTTTTITSNTTTNPYPSGVYASSAENIARLLQDFMKDTPKALTLTSSSPVSETGPLSAAACEEGGEGFEQSFFSFNSMEETQNLTQETRFFHDQESKPVISMDQDHGLISQGSLSLLEKWLFDENMVGMALEGQEAMF

SEQ ID NO: 83 - protein, 307 aa, Vitis vinifera
  MYB domain protein 30 (VvMyb30)
MGRPPCCDKIGVKKGPWTPEEDIILVSYIQEHGPGNWRAVPTSTGLLRCSKSCRLRWTNYLRPGIKRGNFTDQEEKTIIHLQALLGNRWAAIASYLPQRTDNDIKNYWNTHLKKKLKKFPTGVDDHNQDGFSISKGQWERRLQTDIHMAKQALCEALSIDTSSSLPDLKSSNGYNPNTRPVQASTYASSAENIAKLLEGWMRNSPKSTRTNSEATQNSKNSSEGATTPDALDSLFSFNSSNSDLSLSNDETANFTPETILFQDESKPNLETQVPLTMIEKWLFDEGAATQEQEDLIDMSLEDTAQLF

SEQ ID NO: 84 - protein, 322 aa, Populus trichocarpa
  MYB domain protein 081 (PtMyb081)
MGRPPCCDKIGVKKGPWTPEEDIILVSYIQEHGPGNWRAVPTSTGLLRCSKSCRLRWTNYLRPGIKRGNFTDHEEKMIIHLQALLGNRWAAIASYLPQRTDNDIKNFWNTHLKKKLRKLQAGQEGQSRDGLSSTGSQQISRGQWERRLQTDINMARQALCEALSPGKPSSLLTGLKPSCGYEKPATEPIYASSTENISRLLKGWMISGPKQSLKNSTTQNSFIDTAGADSLSSEGTPDKADKNGTGLSQAFESLFGFDSFDSSNSDFSQSMSPDTGLFQDESKPNSSAQVPLSLIERWLFDEGAMQGKDYINEVTIDEDNLF

SEQ ID NO: 85 - protein, 333 aa, Medicago truncatula
  MYB domain protein (MtMyb), MTR4g108430
MGRPPCCEKLGIKKGPWTPEEDIILVSYIQQHGPGNWRSVPTNTGLMRCSKSCRLRWTNYLRPGIKRGNFTDHEEKMIVHLQALLGNRWAAIASYLPQRTDNDIKNYWNTHLKRKMNKDQSSTDEGVDQESRSQLPNKGQWERRLQTDIHMAKQALSEALSLQHNPTTLGTLPDQMKPSSSFSHSHEHPPNLNIPSPYASSYENISRLMETWMKSPNSSAETNSSSIFSNMQGSSCSEGAQSTTQDHHGLNSSKSDYASRFRSSHEGNNSFNLNTKEGLFFHQEERINIKANMETHVPLTLLEKWLFEDGGASHECHEELINMSLEGTTSDFF

SEQ ID NO: 86 - protein, 310 aa, Medicago truncatula
  MYB domain protein (MtMyb), MTR_3g039990
MVRPPCCEKIGVKKGPWTPEEDIILVSYIQEHGPGNWRSVPTTTGLMRCSKSCRLRWTNYLRPGIKRGNFNDHEEKMIIHLQALLGNRWAAIASYLPERTDNDIKNYWNTHLRKKLKKINQTGDENEVEENSIPQVKGQWERRLQTDIHMAKQALCEALSLDKPTPILAENQTSPYASNTENIARLLEKWMKKPENSVETTNSGNSIMVVTGSGSREGGQNTIACKQKDQAFDSLVSFNSLNSDCSQSVSVEEKNFLAMDSCFFQYQSKPNQETQDPLMFMENWPFDDEAAQCNEDLMNVSMEENTPGLF

SEQ ID NO: 87 - protein, 351 aa, Citrus macrophylla
  MYB domain protein 60 (CmMyb60)
MGRPPCCDKIGIKKGPWTPEEDIILVSYIQEHGPGNWRAVPTNTGLLRCSKSCRLRWTNYLRPGIKRGNFTDQEEKMIIHLQALLGNRWAAIASYLPQRTDNDIKNYWNTHLKKKVKKLQLAAAGCSEDNSQYRDELASASSQQISRGQWERRLQTDIHMAKQALCAALSPDKASILSELKPANGFISYTKPAVQAPTYASSTENIAKLLKGWARNAQKSASSNSGVTDQNSINNNVNHIAGAESASSEETPSKVASNSTGIELSEAFESLFGFESFDSSNSTDLSQSVTPESSTFQDYESKQLLLDPSASADDDQMPQLSLIEKWLFDDQGAKDYLNDLKLDDHEDTDMF

SEQ ID NO: 88 - protein, 303 aa, Brachypodium distachyon
  MYB domain protein (BdMyb)
MGRPPCCDQAGVKKGPWTPEEDLMLVSYIQEHGPGNWRAVPTNTGLMRCSKSCRLRWTNYLRPGIKRGNFTDQEEKLIVHLQALLGNRWAAIASYLPERTDNDIKNYWNTHLKRKLKKMSAAAGEDGAAAATAGGAEAKSRATAPKGQWERRLQTDIHTARQALRDALSLDTTAPAPPKPAPMERSSKGAVYASSAENIARLLEGWMRPGEGKASSGGSGSGSRSSASVVSAEGASASHSGTAPTPEGSTVTSKTKDEVAVAAPPAFSMLENWLFDDGMGMGHNGIGDVGLDDVPLGDPSEFF

SEQ ID NO: 89 - protein, 269 aa, Brachypodium distachyon
  MYB domain protein (BdMyb)
MGRPPCCDKDGVKKGPWTPEEDIILVSYVQDHGPGNWRAVPPNTGLMRCSKSCRLRWTNYLRPGIRRGNFSEQEEKHIVQLQALLGNRWAAIASYLPDRTDNDIKNYWNTHLKKKLLHRTSTATPAPAPTTHKDQNNNKGQWERRLQTDIHLARQALREALSLDTASTSATPGPAAYALSAQNVSRMLDDWAVAADSASSEVTECSGGSTASNGTLWSSLLGRESTGAAAAGVEDPAALSAIESWLLLDDGTDRQQPPEQEQSGGQLLP

SEQ ID NO: 90 - protein, 314 aa, Triticum aestivum
  MYB domain protein (TaMyb)
MGRPPCCDKEGVKKGPWTPEEDLVLVSYVQEHGPGNWRAVPTRTGLMRCSKSCRLRWTNYLRPGIKRGNFTDQEEKLIVHLQALLGNRWAAIASYLPERTDNDIKNYWNTHLKRNLQAGGDAAAKPAAQRPASSSKGQWERRLQTDINMARRALREALTTLDDIKRQQPDAADGVNGPAAAGADSGSPAASSSSAASLSQCSPSAAGPYVLTTANISRMLDGWASKGRSAVPAADSPSGSSASEVSYGSGAAARALGSAFEYDRKPAVLAPDQTQLNAIETWLFADDNSNNDHHGHGGGGSGLLGVPATLGYPF

SEQ ID NO: 91 - protein, 321 aa, Oryza sativa
  MYB domain protein (OsMyb), Os09g0414300
MGRPPCCDKVGVKKGPWTPEEDLMLVSYIQEHGAGNWRAVPTNTGLMRCSKSCRLRWTNYLRPGIKRGNFTEQEEKLIVHLQALLGNRWAAIASYLPERTDNDIKNYWNTHLKKKLKKMQAAGGGEDSGAASEGGGGRGDGDGGGKSVKAAAPKGQWERRLQTDIHTARQALRDALSLDHPDPSPATAAAAATPAGSSAAYASSADNIARLLQGWMRPGGGGGGNGKGPEASGSTSTTATTQQQPQCSGEGAASASASASQSGAAAAATAQTPECSTETSKMATGGGAGGPAPAFSMLESWLLDDGGMGLMDVVPLGDPSF

SEQ ID NO: 92 - protein, 310 aa, Oryza sativa
  MYB domain protein (OsMyb), Os08g0437200
MGRPPCCVKAEVKKGPWTPEEDLMLVAYVQEHGPGNWRAVPTNTGLMRCSKSCRLRWTNYLRPGIKRGNFTDQEEKLIVHLQALLGNRWAAIASYLPERTDNDIKNYWNTHLKKKLKKMSATGGGGDDGEGGGAGEVKTRAAAPKGQWERRLQTDIHTARQALRDALSLDPSPPAKPLDSSSGATAPPSSQAATSYASSAENIARLLEGWMRPGGGGGKTTTTPSSGSRSSAASVLSGEASHSGGATAPTPDGSTVTSKTKDEETAGAPPPPPPPAFSMLESWLLDDGMGHGEVGLMDVVVPLGDPSEFF

SEQ ID NO: 93 - protein, 296 aa, Zea mays
  MYB domain protein (ZmMyb)
MGRPPCCEKAGLKKGPWSPEEDLLLVSYVQEHGPGNWRAVPCSTGLMRCSKSCRLRWTNYLRPGIKRGSFSDQEEKLIIHLQELLGNKWSAIASYLPERTDNDIKNYWNTHLKKKLAKTGARESGASAKTTKKSDRAAAPKGQWERRLQTNIHTARQALREALSMDDTAPPAIKPEPLPLPLGQLPAPASQAMYASSIDNIARLLEGWMRPSVSGNASAESMSSFSAFSGGGDGASASHIGTAHTPEGFTGTRKEEGAGPGPASLPMFENWLLDDGMGNGDASLICVPLADPCEFF

SEQ ID NO: 94 - DNA, 3000 bp, Arabidopsis thaliana
  promoter (1)...(3000): vessel-specific REF4 promoter, At2g48110
tttcgcaggccctaattaagacattcaagaaaacaagaagaagcataagaagaggcctaaatgcccagagaattaaacaaatgggcctttaacaatattttaaacaacactgaacaatagatgagatctcaacttcgaaaagctaaagccttaatataaaaccaaacatcaatctctcgccgttaaggttacatctgtcgccgccgctgagaccgccacttaaggccgtctcctccgctctatccatatccaaaacagctataaagataaacttccagagcttggtgaaggagcagcaaccctagttttcaatccctaaaggtgaagtttttgttcttctttttctttgattctactcttttttcgtcacaatagcgcagtagcgatctgggttggcgtttttattgacggattttggtgggtttgggttcgtgttagattttactttcacagattcaggtatgtatttgatcttatttagctttggtaatactcaaaccaactagtatttgatcttaattaggtgacgttgatattttgtgtgttgtgggtcaatcatccactctaggttgatctgcgtctatgtttagtcctaattttgaagaatcattctaattgctgatgtttatttatgacaattttatgtcttacttcgaatttagctaagataataaatctagacgagtgcctttataaacagtttatgtatgaacaatgcttcgcttgtgggattgttgatttcactacatttgattaagaatgtacatactattacaaatgttatcgattaaaaacgtcattttcagatattagttctccagcgagttgacacaaaacccgattacgtttcatccggcgactcgctttgatattccatggattctcagttgaatccttccaagagacgcaagataaggttcgcgtctctcatcttttccccagttttttttcttattcgaatcacttaaggcttgagaaattagtggttagggtgtgtaaattgcgtttgatatagtgtcaggcacagatgcgttgcgtgctataagatgttcaatagacgagaacacctcgttgagcacatgaagatttcctaccactcacttcaccagcctcgctgtggggtttgcctcaagcactgtaaatccttcgaatccgtgagggaacaccttaacggtatgtttgtatttgtattcgttttccaccacacatcgtatgaatatggtggttgttgatgtttgtttgattccgtctttccaactatttcagttccagaccatctttccaaaggaaactgcaaagccattttcactaaacgaggctgtactctctgtcttcaaatctttgaggaggcctttgctctcgccgagcataaaaacaagtgtcacctctccccacctcgtcctcttgtaagttttgttgggaattatttagataatgtggactatatatgctctgccgcctccaatattcccgagtctattctttctgattattgaaatatcagcagttttccccttaaatgatctgattagtgctttattcatatcagggaacatctacccaaaggaatccttctagttcacttgctggttcacgtctcaaggctatggcacttgactgtgaaatggttggtggtggtgctgatgggactattgatcagtgcgcatcggtttgcctggttgacgatgacgagaatgtgatcttctccactcacgttcaaccactgctccctgtcaccgattacaggttctgcttgtggaccatttgtgcttgttttgttttataattcttccttttaaatctcaccccgcctcatgttcaggcacgagataactggattgactaaggaagatttgaaggatggtatgccacttgagcatgtacgagagagagttttttcgttcttgtgcggtggacagaatgatggggctggaaggcttcttcttgttggtcatgaccttaggcatgatatgagttgcttgaagcttgaataccctagccatttgttgaggtaactaactgacccgtttttgttgactctttgcttgaaatctaatgtaattgctatgcttcacctcagagacacagcaaaatacgtgccgttgatgaagacaaatcttgtaagccaatcgctcaagtacctcacaaagtcatatctcgggtaagttatgcttgggctttgatttgttgacattggattatgaaaacttggaacatgagatagaaactggttttgtttgtatgtgtagatacaagatccagtgcgggaagcacgaggtttacgaggactgtgtatctgcgatgagactgtacaagagaatgcgggatcaagagcatgtttgtagtggaaaggcagaagggaatggtctgaactcgcggaaacagagcgatctagagaagatgaatgcggaagagctgtaccaaaaatcaacgtcagagtaccggtgctggtgccttgaccgactcagcaatccatgaaatgaaatcccaatttctcttttaaaagaaagctccttctcttcctcccttaagtctctttttgttcgatgggaggattaagaagacttgttaagagcttttccggctagtttttggataatcaaatatgatatggcttcattcaacaacaactctccctttgggaactcgtataaaaagttactacttaagcttcaaatctgtgtaactaaaatggataaagtctgatgcatctgaggtcttggaatctgttgctcatagttgtggataccagcaacatcaaacattattacttgtttaccaaacccactctcagcttccatttcatcagtttgaagtcaagtggataaaaagactgtctacataactcaaatactgtagtattatattcacatataaatgagaaattgacatttcctctagaaaaagaaaagcaatcgtgtgagaagaaacaagtaaaaggctgaggaagaagacgactattagtccccgtcgaacttgtttctcccggtcgtccaacaa

SEQ ID NO: 95 - DNA, 3000 bp, Arabidopsis thaliana
  promoter (1)...(3000): vessel-specific RFR1 promoter, At3g23590
aaatgatttgttttgtgaatagttgattccagctaatgtggtgaaagacaatcatcttacgtttggtgattgtatcaactacattgatgaagaagggaacttagtaggacaaagagggaataagcagatgataggatttgcttcaaaggatgcatggcgacataatttgcagaaggattagacataataacatgaagatactgtcaagtatgagctccttcatgaacttaagtacgttcataattccacttgatccacaactttgggctattggtataaaaagctaactttatctagattacatgctacatctcaattcaagatgtccatttattaaagcaaaggcatgactttatcttcgactagaaactggtgatggaccatcctcaacctccactagcatcatctccacctactcctaaccactaacccaattatccttttcaccttttcctctcaacactatcctatttttaggtgatttagggaaaagagaaatactacactttgatgtaattttttttttaattgaattgagctttgaatactatggttaatatggatgaaagaaaacacacgttcctactaatttctttttctaaatgatgacgttttctcaagttacttatcgtagtctaatcggttattgacaaaaatgatctagacgtttgaaaatcattggccaacctcttcactagatagaatttttatttctaaccattacctacctgatacacacaccaagttctgaatctagagatgatcttgtctcatttgtttatagactaaagagtatataaaagctggattcatgtgggtcatccatcattaatcgtgttcttcaattcaccaacttcgtaggttccgcatcttttgtactttctttctatttttaatcttgcaatatcaaaaataaatatatacaccttttaaaaaaattctgaatatgcatatggtaatggtatcatcagaaaacattgaatattgaatcgtctatctaccaatctcttcaagttgtgaattttatttatcaaaaaaaaaaaaaaaatcaactgaaacgtcaatgttatgttttgcttcaatctaaagaaagttgtaccaaaaataaagtacttttttaccaagaaatttcggattgtagccaaaatatgtcttgttttattttttttgttcaccaaaaatatgttaaactagttttttgactttttcccccatgcgttgttgttgttattcggacgaccaatatttaatacagtattcaagtgtagctaagctactgattccagataaagtaaaaaaatgtctttgataccaacttcactttgaccaattatcgaactctttaatttcataatatatagctttgacaaatatcccatcagaattcataaatcgccacatgaatcttataattgtcaactatgtgcagtccaatattaatatcatggaaaactagattactagcatttaatttcttaattgtatttaggttatagacttaacatggtttttcttctagagcattttcactacatttttttctttctatgttattattttatgttttacttattgttacatccatttacaacgatgttggataaaatatttttaactgttcagtccgtaaatgactagctaaatttttacggatatatttttacataaaaaaagaaattatttttacgatttaccaatttaactcttctttctctctaagttttcatttattaaaaatgatagtttttttaagaaagttatttgtatttatttatttaaaattggatgcaaaaaattacaaaacttggaagaaatattgttaacccatctttatcagtatagaatttctgattactccctgcgttgaaaataagaagatccatagaacgtggtaatgtttttttttttttttttctggcaagaaatggtaatgttaatcaattagactcatgactaaagctggaaaatttgactaaaatggtattatcttgcattattacctaaaagctcttcttgcattactctttcatgcaaaattgcctccaaaagtcatacttcgaaatcatggctttgtaactcacccttgccaccatctatctaaacttattattgtttaaaacaaaattgattttcaaagaaaaaaaaaatataaactcccaccggtcaataacttttaattttcacttcaattattcataaaataaatatatacaccttgattctttcttaataactggagttattttgaatttaaattacttttgaaatacaaaagaaagtaagataattttgccatttaaaatgtctacaacaattatgttaacacttaacatacatttttagaaccaaatggtaatggtccactagttaaaagatttcttatgaatgtctttttatgcagagttcgaattttctcacaacgattttaaccattttcgtcactcgcaaaatttttagtggataacaaaaaaaaaaaaaagttgaaatttaatggaaatttaggagatttgtccaatttttaattttcccgattaatttaaaaaatctactttacgccttttattgacaaagatgcatattaactatatatatatatatatatatatatatatatatatatatatattataaactaaattttgtagaacccatcagaagaaatttgtacttttaactttaaaatcaattaaaaaatttcaattcaaataaaaaaaaatccaaaattgtttataaattcaagaaatataacacacaagttgacataaacagtggagagatttgtgaaatgtgaactcttttgacgtctttctcatatttcgtctcgggacaattcacacgcactgaatcatctctctcacgaggactattcagccatttgcaaacgcacacacaaacgcacacgcgtttatttttttttcgccaaatcaaatctgaagagttcctgtatcttttaaccgctcttcttcttcttcagagagcttcgttgattgaacggaaaaa

SEQ ID NO: 96 - protein, 711 aa, Artificial Sequence
  synthetic phenylalanine ammonia lyase (PAL) consensus sequence (Majority)
  VARIANT (2)...(2): Xaa = Glu, Ala, Val, Ser, Pro or Asp
  VARIANT (7)...(7): Xaa = His, Asn, Met, Lys, Ala, Gly or Ser
  VARIANT (14)...(14): Xaa = Val, Ser, Gly, Ala, Glu or Leu
  VARIANT (15)...(15): Xaa = Met, Leu, Ser, Cys, Asn, Glu, Val, Phe or Ala
  VARIANT (17)...(17): Xaa = Cys, Thr, Ala, Asn, Val, Trp or Ile
  VARIANT (19)...(19): Xaa = Ala, Gln, Arg, Glu, Gly, Ile, Val, Thr or Ser
  VARIANT (31)...(31): Xaa = Gln, Ala, Glu, Asp, Ser or Thr
  VARIANT (70)...(70): Xaa = Ile, His, Ala, Arg, Gly, Leu, Ser or Asn
  VARIANT (143)...(143): Xaa = Ser, Cys, Gly, Glu, Asn or Thr
  VARIANT (440)...(440): Xaa = Ala or Gly
  VARIANT (594)...(594): Xaa = Asp or Glu
  VARIANT (624)...(624): Xaa = Val, Leu, Ala, Gln or Ile
  VARIANT (631)...(631): Xaa = Ala, Ser, Leu or Gly
  VARIANT (640)...(640): Xaa = Thr, Asn, Gln or Ser
MXAEAGXGHANGSXXCXSXADPLNWGVAAEXMKGSHLDEVKRMVAEYRKPVVKLGGETLTIAQVAAIAAXDDGVKVELSESARAGVKASSDWVMDSMNKGTDSYGVTTGFGATSHRRTKQGGALQKELIRFLNAGIFGNGTEXHTLPHSATRAAMLVRINTLLQGYSGIRFEILEAITKLLNNNITPCLPLRGTITASGDLVPLSYIAGLLTGRPNSKAVGPDGEKLNAAEAFKLAGIESGFFELQPKEGLALVNGTAVGSGLASMVLFEANVLAVLSEVLSAIFAEVMNGKPEFTDHLTHKLKHHPGQIEAAAIMEHILDGSSYMKAAKKLHEMDPLQKPKQDRYALRTSPQWLGPQIEVIRAATKSIEREINSVNDNPLIDVSRNKALHGGNFQGTPIGVSMDNTRLAIAAIGKLMFAQFSELVNDFYNNGLPSNLSXGRNPSLDYGFKGAEIAMASYCSELQYLANPVTNHVQSAEQHNQDVNSLGLISSRKTAEAIDILKLMSSTFLVALCQAIDLRHLEENLKSAVKNTVSQVAKKTLTTGANGELHPSRFCEKDLLKVVDREYVFAYADDPCSATYPLMQKLRQVLVXHALANGENEKNANTSIFQKIAAFEEELKAXLPKEVEXARAAYESGXAAIPNRIKECRSYPLYRFVREELGTELLTGEKVRSPGEEFDKVFTAMCQGKIIDPLLECLKEWNGAPLPIC

SEQ ID NO: 97 - protein, 714 aa, Physcomitrella patens
  moss phenylalanine ammonia lyase (PpPAL3)
METITKNGYQNGSSESLCTQRDPLSWGVAAEAMKGSHLDEVKRMVAEYRKPVVNLAGQTLTIAQVASIAGHDASNVKVELSESARPRVKASSDWVMDSMDKGTDSYGVTTGFGATSHRRTKQGGALQKELIRFLNAGIFGNGTETCHTLPHSATRAAMLVRINTLLQGYSGIRFEILEAITKLLNNNITPCLPLRGTITASGDLVPLSYIAGLLTGRPNSKATGPNGEVLDAVEAFKAAGIDSGFFELQPKEGLALVNGTAVGSGLASMVLFETNVLAVLSELISAIFAEVMNGKPEFTDHLTHKLKHHPGQIEAAAIMEHILDGSAYMKAAKKLHEMDPLQKPKQDRYALRTSPQWLGPQIEVIRFSTKSIEREINSVNDNPLIDVSRNKALHGGNFQGTPIGVSMDNVRLAIASIGKLLFAQFSELVNDFYNNGLPSNLTASRNPSLDYGFKGAEIAMASYCSELQYLANPVTSHVQSAEQHNQDVNSLGLISSRKTAESVDILKLMSTTFLVALCQAIDLRHLEENLRSAVKNTVSHVSKRVLTTGANGELHPSRFCEKELLKVVDREDVFAYADDPCSATYPLMQKLRQVLVDHALANGENEKNTSTSVFQKITAFEEELKALLPKEVESARAAYDSGNSAIENKIKECRSYPLYKFVREELGTGLLTGEKVRSPGEEFDKVFTAMCQGKIIDPMLECLGEWNGAPLPIC

SEQ ID NO: 98 - protein, 714 aa, Oryza sativa
  rice phenylalanine ammonia lyase (OsPAL)
MECENGHVAAAANGSSLCVAKPRADPLNWGKAAEELSGSHLDAVKRMVEEYRRPVVTIEGASLTIAQVAAVASAGAARVELDESARGRVKASSDWVMNSMMNGTDSYGVTTGFGATSHRRTKEGGALQRELIRFLNAGAFGNGDDGHVLPAAATRAAMLVRINTLLQGYSGIRFEILETIATLLNANVTPCLPLRGTITASGDLVPLSYIAGLVTGRPNSVAVTPDGRKVDAAEAFKIAGIQHGFFELQPKEGLAMVNGTAVGSGLASMVLFEANVLGVLAEVLSAVFCEVMNGKPEYTDHLTHKLKHHPGQIEAAAIMEHILEGSSYMMLAKKLGELDPLMKPKQDRYALRTSPQWLGPQIEVIRAATKSIEREINSVNDNPLIDVSRGKALHGGNFQGTPIGVSMDNTRLAIAAIGKLMFAQFSELVNDFYNNGLPSNLSGGRNPSLDYGFKGAEIAMASYCSELQFLANPVTNHVQSAEQHNQDVNSLGLISSRKTAEAIDVLKLMSSTFLIALCQAIDLRHLEENVRSAVKGCVTTVARKTLSTSATGDLHKARFCEKDLLQAIDREAVFAYADDPCSANYPLMQKMRAVLIEHALANGEAERNVDTSVFAKVATFEEELRVALPREVEAARAAVENGTAAKANRITECRSYPLYRFVREELGTEYLTGEKTRSPGEEVNKVFVAMNQGKHIDALLECLKEWNGEPLPIC

SEQ ID NO: 99 - protein, 715 aa, Zea mays
  maize phenylalanine ammonia lyase (ZmPAL)
MECENGHVAASGNGGVCLATPAPRADPLNWAKAAEDLAGSHLDAVKRMVEEYRRPLVKIEGASLTVAQVAAVAAAGEARVELDESARGRVKASSDWVMDSMMNGTDSYGVTTGFGATSHRRTKEGGALQRELIRFLNAGAFGTGDDGHVLPAAATRAAMLVRINTLLQGYSGIRFEILEAIAVLLNANVTPCLPLRGTITASGDLVPLSYIAGLVTGRPNSTAVAPDGRKVGAAEAFEIAGIQHGFFELQPKEGLAMVNGTAVGSGLASMVLFEANVLAVLAEVMSAVFCEVMNGKPEYTDHLTHKLKHHPGQIESAAIMEHILEGSSYMALAKKLGELDPLMKPKQDRYALRTSPQWLGPQIEVIRAATKSIEREINSVNDNPLIDVSRGKALHGGNFQGTPIGVSMDNTRLAVAAIGKLMFAQFSELVNDFYNNGLPSNLSGGRNPSLDYGFKGAEIAMASYCSELQFLANPVTNHVQSAEQHNQDVNSLGLISSRKTAEAVDVLKLMSSTFLVALCQAIDLRHLEENLRSAVKRCVTAVARKTLSTGATGALHDARFCEKDLLTAVDREAVFAYADDPCSATYPLMQKMRSVLVEHALANGEAERDPDTSVFAKVATFEEELRAALPREVDAARAAVESGTAAIRNRIAECRSYPLYRFVREELGTEYLTGEKARSPGEEVDKVFVAMNLGKHIDAVLECLKEWNGEPLPIC

SEQ ID NO: 100 - protein, 704 aa, Sorghum bicolor
  sorghum phenylalanine ammonia lyase (SbPAL)
MAGNGAIVESDPLNWGAAAAELSGSHLDEVKRMVAQARQPVVKIEGSTLRVGQVAAVASAKDASGVAVELDEEARPRVKASSEWILDCIAHGGDIYGVTTGFGGTSHRRTKDGPALQVELLRHLNAGIFGTGSDGHTLPSEVVRAAMLVRINTLLQGYSGIRFEILEAITKLLNTGVSPCLPLRGTITASGDLVPLSYIAGLITGRPNAQATTVDGRKVDAAEAFKIAGIEGGFFKLNPKEGLAIVNGTSVGSALAATVMYDANVLAVLSEVLSAIFCEVMNGKPEYTDHLTHKLKHHPGSIEAAAIMEHILDGSAFMKHAKKVNELDPLLKPKQDRYALRTSPQWLGPQIEVLRAATKSIEREVNSVNDNPVIDVHRGKALHGGNFQGTPIGVSMDNARLAIANIGKLMFAQFSELVNEFYNNGLTSNLAGSRNPSLDYGFKGTEIAMASYCSELQYLGNPITNHVQSAEQHNQDVNSLGLVSARKTAEAIDILKLMSSTYIVALCQAIDLRHLEENIKTSVKNTVTQVAKKVLTMNPSGDLSSARFSEKELITAIDREGVFTYAEDPASASLPLMTKLRAVLVDHALSSGDAEREPSVFSKITKFEEELRAVLPREVEAARVAVAEGTAPVANRIADSRSFPLYRFVREELGCVFLTGEKLKSPGEECTKVFNGINQGKLVDPMLECLKEWDGKPLPINVVN

SEQ ID NO: 101 - protein, 718 aa, Pinus massoniana
  pine phenylalanine ammonia lyase (PlPAL)
MVAAAEMTQANEVQVKSTGLCTDFGSSGSDPLNWVRAAKAMEGSHFEEVKAMVDSYLGVKEIFIEGKSLTISDVAAVARRSQVKVKLDAEAAKSRVEESSNWVLTQMNKGTDTYGVTTGFGATSHRRTNQGAELQKELIRFLNAGVLGKCPENVLSEDTTRAAMLVRTNTLLQGYSGIRWDILETVEKLLNAGLTPKLPLRGTITASGDLVPLSYIAGLLTGRPNSRVRSRDGIEMSGAEALKKVGLEKPFELQPKEGLAIVNGTSVGAALASIVCFDANVLALLSEVISAMFCEVMNGKPEFTDPLTHKLKHHPGQMEAAAIMEYVLDGSSYMKHAAKLHEMNPLQKPKQDRYALRTSPQWLGPQVEIIRSATHMIEREINSVNDNPVIDVARDKALHGGNFQGTPIGVSMDNLRLSISAIGKLMFAQFSELVNDYYNGGLPSNLSGGPNPSLDYGLKGAEIAMASYTSELLYLANPVTSHVQSAEQHNQDVNSLGLVSARKSAEAIDILKLMLSTYLTALCQAVDLRHLEENMLATVKQIVSQVAKKTLSTGLNGELLPGRFCEKDLLQVVDNEHVFSYIDDPCNASYPLTQKLRNILVEHAFKNAEGEKDPNTSIFNKIPLFEAELKAQLELQVSLARESYDKGTSPLPNRIQECRSYPLYEFVRNQLGTKLLSGTRTTSPGEVIEVVYDAISEDKVIVPLFKCLDGWKGTPGPF

SEQ ID NO: 102 - protein, 725 aa, Medicago sativa
  alfalfa phenylalanine ammonia lyase (MsPAL)
METISAAITKNNANESFCLIHAKNNNNMKVNEADPLNWGVAAEAMKGSHLDEVKRMVAEYRKPVVRLGGETLTISQVAAIAAHDHGVQVDLSESARDGVKASSEWVMESMNKGTDSYGVTTGFGATSHSRTKQGGALQKELIRFLNAGIFGNGTESNHTLPKTATRAAMLVRINTLLQGYSGIDFEILEAITKPLNKTVTPCLPLRGTITASGDLVPLSYIAGLLTGRPNSKAHGPSGEVLNAKEAFNLAGINAEFFELQPKEGLALVNGTAVGSGLASIVLFEANILAVLSEVLSAIFAEVMQGKPEFTDHLTHKLKHHPGQIEAAAIMEHILDGSSYVKAAKKLHEIDPLQKPKQDRYALRTSPQWLGPLVEVIRFSTKSIEREINSVNDNPLIDVSRNKALHGGNFQGTPIGVSMDNTRLALASIGKLMFAQFSELVNDFYNNGLPSNLSASRNPSLDYGFKGAEIAMASYCSELQYLANPVTTHVQSAEQHNQDVNSLGLISARKTNEAIEILQLMSSTFLIALCQAIDLRHLEENLKNSVKNTVSQVAKKTLTMGVNGELHPSRFCEKDLLKVVDREHVFAYIDDPCSATYPLSQKLRQVLVDHALVNGESEKNFNTSIFQKIATFEEELKTLLPKEVESARTAYESGNPTIPNKINGCRSYPLYKFVREELGTGLLTGENVISPGEECDKLFSAMCQGKIIDPLLECLGEWNGAPLPIC

SEQ ID NO: 103 - protein, 700 aa, Triticum aestivum
  wheat phenylalanine ammonia lyase (TaPAL)
MACAWRSRSRADPLNWGKAAEELSGSHLEAVKRMVEEYRKPVVTMEGATTIAMVAAVAAGSDTRVELDESARGRVKESSDWVMNSMMNGTDSYGVTTGFGATSHRRTKEGGALQRELIRFLNAGAFGTGTDGHVLPAAATRAAMLVRVNTLLQGYSGIRFEILETIATLLNANVTPCLPLRGTITASGDLVPLSYIAGLVTGRPNSMATAPDGSKVNAAEAFKIAGIQHGFFELQPKEGLAMVNGTAVGSGLASMVLFEANVLSLLAEVLSGVFCEVMNGKPEFTDHLTHKLKHHPGQIEAAAIMEHILEGSSYMMLAKKLGELDPLMKPKQDRYALRTSPQWLGPQIEVIRAATKSIEREINSVNDNPLIDVSRGKAIHGGNFQGTPIGVSMDNTRLAIAAIGKLMFAQFSELVNDFYNNGLPSNLSGGRNPSLDYGFKGAEIAMASYCSELQFLGNPVTNHVQSAEQHNQDVNSLGLISSRKTAEAIDILKLMSSTFLVALCQAIDLRHLEENVKNAVKSCVKTVARKTLSTDNNGHLHNARFCEKDLLLTIDREAVFAYADDPCSANYPLMQKMRAVLVEHALANGEAEAHVETSVFAKLAMFEQELRAVLPKEVEAARSAVENGTAAQQNRIAECRSYPLYRFVRKELGTEYLTGEKTRSPGEEVDKVFVAMNQGKHIDALLECLKEWNGEPLPLC

SEQ ID NO: 104 - protein, 717 aa, Glycine max
  soybean phenylalanine ammonia lyase (GmPAL2)
MASEANAANTNFCVNVSNNGYISANDPLNWGAAAEAMAGSHLDEVKRMLEEYRRPVVKLGGETLTISQVAAIAAHDQGVKVELAESSRAGVKASSDWVMESMNKGTDSYGVTTGFGATSHRRTKQGAALQKELIRFLNAGIFGNGTESNCTLPHTATRAAMLVRINTLLQGYSGIRFEILEAITKLLNNNITPCLPLRGTITASGDLVPLSYIAGLLTGRPNSKAVGPSGEILNAKEAFELANIGAEFFELQPKEGLALVNGTAVGSGLASIVLFEANIIAVLSEVISAIFAEVMQGKPEFTDHLTHKLKHHPGQIEAAAIMEHILEGSSYVKAAKKLHEIDPLQKPKQDRYALRTSPQWLGPLIEVIRFSTKSIEREINSVNDNPLIDVSRNKALHGGNFQGTPIGVSMDNTRLALASIGKLMFAQFSELVNDYYNNGLPSNLTASRNPSLDYGFKGAEIAMASYCSELQYLANPVTSHVQSAEQHNQDVNSLGLISSRKTHEAIEILKLMSSTFLVALCQAIDLRHLEENLKNTVKNVVSQVAKRTLTTGVNGELHPSRFCEKDLLKVVDREYTFAYIDDPCSGTYPLMQKLRQVLVDYALANGENEKNTSTSIFQKIATFEEELKTLLPKEVEGARVAYENDQCAIPNKIKECRSYPLYKFVREELGTALLTGERVISPGEECDKVFTALCQGKIIDPLLECLGEWNGAPLPIC

SEQ ID NO: 105 - protein, 713 aa, Beta vulgaris
  sugar beet phenylalanine ammonia lyase (BvPAL)
MECENAHVAANGDGLCVAQPARADPLNWGKAAEELSGSHLDAVKRMVEEYRKPVVTMEGASLTIAMVAAVAAGNDTRVELDESARGRVKESSDWVMNSMMNGTDSYGVTTGFGATSHRRTKEGGALQRELIRFLNAGAFGTGTDGHVLPAATTRAAMLVRVNTLLQGYSGIRFEILETIATLLNANVTPCLPLRGTITASGDLVPLSYIAGLVTGRPNSVATAPDGTKVNAAEAFKIAGIQHGFFELQPKEGLAMVNGTAVGSGLASMVLFEANILSLLAEVLSAVFCEVMNGKPEYTDHLTHKLKHHPGQIEAAAIMEHILEGSSYMILAKKLGELDPLMKPKQDRYALRTSPQWLGPQIEVIRAATKSIEREINSVNDNPLIDVSRGKAIHGGNFQGTPIGVSMDNTRLAIAAIGKLMFAQFSELVNDFYNNGLPSNLSGGRNPSLDYGFKGAEIAMASYCSELQFLGNPVTNHVQSAEQHNQDVNSLGLISSRKTAEAIDILKLMSSTFLVALCQAIDLRHLEENVKNAVKSCVKTVARKTLSTDNNGHLHKARFCEKDLLLTIDREAVFAYADDPCSVNYPLMQKMRAVLVEHALANGEAEHDVETSVFAKLATFEQELRAVLPTEVEAARSAVENGTAAQQNRISECRSYPLYRFVRKELGTEYLTGEKTRSPGEEVDKVFVAMNQGKHIDALLECLKEWNGEPLPIC

SEQ ID NO: 106 - protein, 715 aa, Nicotiniana tabacum
  tobacco phenylalanine ammonia lyase (NtPAL1)
MASNGHVNGGENFELCKKSADPLNWEMAAESLRGSHLDEVKKMVSEFRKPMVKLGGESLTVAQVAAIAVRDKSANGVKVELSEEARAGVKASSDWVMDSMNKGTDSYGVTTGFGATSHRRTKNGGALQKELIRFLNAGVFGNGTETSHTLPHSATRAAMLVRINTLLQGYSGIRFEILEAITKLINSNITPCLPLRGTITASGDLVPLSYIAGLLTGRPNSKAVGPNGETLNAEEAFRVAGVNGGFFELQPKEGLALVNGTAVGSGMASMVLFDSNILAVMSEVLSAIFAEVMNGKPEFTDHLTHKLKHHPGQIEAAAIMEHILDGSSYVKAAQKLHEMDPLQKPKQDRYALRTSPQWLGPQIEVIRAATKMIEREINSVNDNPLIDVSRNKALHGGNFQGTPIGVSMDNARLALASIGKLMFAQFSELVNDYYNNGLPSNLTASRNPSLDYGFKGAEIAMASYCSELQFLANPVTNHVQSAEQHNQDVNSLGLISARKTAEAVDILKLMSSTYLVALCQAIDLRHLEENLKNAVKNTVSQVAKRTLTMGANGELHPARFCEKELLRIVDREYLFAYADDPCSCNYPLMQKLRQVLVDHAMNNGESEKNVNSSIFQKIGAFEDELKAVLPKEVESARAALESGNPAIPNRITECRSYPLYRFVRKELGTELLTGEKVRSPGEECDKVFTAMCNGQIIDPMLECLKSWNGAPLPIC

SEQ ID NO: 107 - protein, 720 aa, Solanum tuberosum
  potato phenylalanine ammonia lyase (StPAL1)
MAPSIAQNGHVNGEVEEVLWKKSIHDPLNWEMAVDSLRGSHLDEVKKMVDEFRKPIVKLWGETLTVAQVASIANADNKTSGFKVELSESARAGVKASSDWVMDSMSKGTDSYGVTTGFCATSHRRTKNGGALQKELIKFLNAGVFGNGTESTHTLPHSATRAAMLVRINTLLQGYSGIRFEILEAITKLINSNITPCLPLRGTVTASGDLVPLSYIAGLLTGRPNSKAVGPSGSKLDADEAFRVAAVSGGFFELQPKEGLALVNGTAVGSGMASIVLYDSNILAVMFEVLSAIFAEVMNGKPEFTDYLTHKLKHHPGQIEAAAIMEHILDGSSYVKAAQKLHEMDPLQKPKQDRYALRTSPQWLGPQIEVIRAATKMIEREINSVNDNPLIDVSRNKAIHGGNFQGTPIGVSMDNTRLALASIGKLMFAQFSELVNDYYNNGLPSNLTAGRNPSLDYGFKGAEIAMASYCSELQFLANPVTNHVQSAEQHNQDVNSLGLISARKTAEAVDILKLMSSTYLVALCQAIDLRHLEENLKSVVKNTVSQVAKRTLTIGAIGELHPARFCEKELLRVVDREYLFTYADDPCSSTYPLMQKLRQVLVDHAMKNGESEKNINSSIFQKIGAFEDELNAVLPKEVESARALLESGNPSIPNRITECRSYPLYRLVRQELGTELLTGEKVRSPGEEIEKVFTAMCNGQINDPLLECLKSWNGAPLPIC

SEQ ID NO: 108 - protein, 712 aa, Bambusa oldhamii
  bamboo phenylalanine ammonia lyase (BoPAL)
MPREDGHVAANGNGLCMAAPRADPLNWGKAAEELMGSHLDEVKRMVAEYRQPVVKIEGASLRIAQVAAVAVAGDAKVELDESARERVKASSDWVMNSMMNGTDSYGVTTGFGATSHRRTKEGGALQRELIRFLNAGAFGTGCDGHVLPAEATRAAMLVRINTLLQGYSGIRFEILEAITKLLNANVTPCLPLRGTVTASGDLVPLSYIAGLVTGRENSVAVAPDGRKVNAAEAFKIAGIQGGFFELQPKEGLAMVNGTAVGSGLASTVLFEANILAILAEVLSAVFCEVMNGKPEYTDHLTHKLKHHPGQIEAAAIMEHILEGSSYMKLAKKLGDLDPLMKPKQDRYALRTSPQWLGPQIEVIRAATKSIEREINSVNDNPLIDVSRNKALHGGNFQGTPIGVSMDNTRLAIAAIGKLMFAQFSELVNDFYNNGLPSNLSGGRNPSLDYGFKGAEIAMASYCSELQFLGNPVTNHVQSAEQHNQDVNSLGLISSRKTAEAIDILKIMSSTFLVALCQAIDLRHIEENVKSAVKSCVMTVAKKTPSTNSTGDLHVARFCEKDLLKEIDREAVFAYADDPCSPNYPLMKKLRSVLVESALANGMAEFNAETSIFARVALFEEELRAALPRAVEAARASVENGTAAAPNRITECRSYPLYRFVREELGTEYLTGEKTRSPGEELNKVLLAINQGKHIDPLLECLKEWNGEPLPIC

SEQ ID NO: 109 - protein, 722 aa, Brassica rapa
  phenylalanine ammonia lyase (BnPAL1)
MEVNGLSHGGEVDAMLCGGEIKKNATVVGADPLNWGAAAEQMKGSHLDEVKRMVKEFRRPVVNLGGETLTIGQVAAISTLGNGVKVELSETARAGVKASSDWVMESMGKGTDSYGVTTGFGATSHRRTKNGVALQKELIRFLNAGIFGSTKETSHTLPHSATRAAMLVRINTLLQGYSGIRFEILEAITSFLNNNITPSLPLRGTITASGDLVPLSYIAGLLTGRPNSKATGPNGEALNAEEAFKMAGVTSGFFDLQPKEGLALVNGTAVGSGMASMVLFEANVLSVLAEVLSAVFAEVMSGKPEFTDHLTHRLKHHPGQIEAAAIMEHILDGSSYMKLAQKLHEMDPLQKPKQDRYALRTSPQWLGPQIEVIRYATKSIEREINSVNDNPLIDVSRNKAIHGGNFQGTPIGVSMDNTRLAIAAIGKLMFAQFSELVNDYYNNGLPSNLTASRNPSLDYGFKGAEIAMASYCSELQYLANPVTSHVQSAEQHNQDVNSLGLISSRKTSEAVDILKLMSTTFLVGICQAIDLRHLEENLKQTVKNTVSQVAKKVLTTGVNGELHPSRFCEKDLLKVVDREQVYTYADDPCSATYPLIQKLRQVIVDHALVNGESEKNAMTSIFHKIGAFEEELKAVLPKEVEAARAAYDNGTAAIPNRIKECRSYPLYRFVREELGTELLTGEKATSPGEEFDKVFTAICEGKIIGPLMECLDEWNGAPIPIC

SEQ ID NO: 110 - protein, 667 aa, Helianthus annuus
  sunflower phenylalanine ammonia lyase (HaPAL)
MENGTHVNGSANGFCIKDPLNWGVAAEALTGSHLDEVKKMVGEFRKPVVKLGGETLTVSQVAGISAAGDGNMVKVELSEAARAGVKASSDWVMESMNKGTDSYGVTTGFGATSHRRTKNGGALQKELIRFLNAGIFGNGTESSHTLPHSATRAAMLVRINTLLQGYSGIRFEILEAITKFLNNNITPCLPLRGTITASGDLVPLSYIAGLLTGRPNSKAVGPAGEVLNAESAFAQAGVEGGFFELQPKEGLALVNGTAVGSGMASMVLFEANVLALLSEVLSAIFAEVMQGKPEFTDHLTHKLKHHPGQIEAAAIMEYILDGSDYVKAAQKVHEMDPLQKPKQDRYALRTSPQWLGPQIEVIRSATKMIEREINSVNDNPLIDVSRNKALHGGNFQGTPIGVSMDNTRLAIAAIGKVTIAQFSELVNDFYNNGLPSHLSGGRNPSLDSGFKGGEIAMASYCSELQFLANPVTNHVQSAEQHNQDVNSLGLISARKTAEAVDILKLMSSTYLVALCQSIDLRHLEENMKSTVKNTVSQVAKKVLTMGVNGELHPSRFCEKDLLRVVDREYVFAYADDPCLTTYPLMQKLRQVLVDHALNNGETEKNANTSIFQKIATFEDELKAILPKEVESVRVAFENGTMSIPNRIKACRSYPLYRFVREELGGAT

SEQ ID NO: 111 - protein, 714 aa, Ricinus communis
  phenylalanine ammonia lyase (RcPAL)
MAAMAENGSKNDSLESFCNMGRDPLSWGLAAESMKGSHLDEVKKMVAEYRKPFVKLGGETLTVAQVAAIASHDCGVKVELSESARAGVKASSDWVMDSMNKGTDSYGVTTGFGATSHRRTKQGGALQKELIRFLNAGIFGNGTESCHTLPHSATRAAMLVRINTLLQGYSGIRFEILEAITKLLNHNITPCLPLRGTITASGDLVPLSYIAGLLTGRPNSKAIGPNGESMDALEAFRLAGIESGFFELQPKEGLALVNGTAVGSGLASMVLFEANILAVLSEILSAIFAEVMNGKPEFTDHLTHKLKHHPGQIEAAAIMEHILDGSSYVKAAKKLHEMDPLQKPKQDRYALRTSPQWLGPQIEVIRFSTKSIEREINSVNDNPLIDVSRNKALHGGNFQGTPIGVSMDNARLAIASIGKLMFAQFSELVNDFYNNGLPSNLTAGRNPSLDYGFKGAEIAMASYCSELQYLANPVTSHVQSAEQHNQDVNSLGLISSRKTAEAVDILKLMSTTYLVALCQAIDLRHLEENLRQAVKNTVSQVAKRVLTTGANGELHPSRFCEKDLLKVVDREYVFAYADDPCSATYPLMQKLRQILVEHALANGENEKNAGTSVFQKISAFEEELKTLLPKEVESVRIAYESGNPATANRIKECRSYPLYKFVREELGTGLLTGDKVMSPGEEFDKVFTAMCQGKIIDPMMDCLKEWNGAPLPIC

SEQ ID NO: 112 - protein, 710 aa, Vitis vinifera
  grape phenylalanine ammonia lyase (VvPAL)
MDATNCHGSNKVESFCVSDPLNWGMAAETLKGSHLDEVKRMVAEYRKPVVRLGGETLTISQVAAIAGREGDVGVELSETARAGVNASSEWVMESMSKGTDSYGVTTGFGATSHRRTKQGGALQKELIRFLNAGIFGNGTESCHTLPHSATRAAMLVRINTLLQGYSGIRFEILEAITKLLNHNITPCLPLRGTVTASGDLVPLSYIAGLLTGRPNSKAVGPSGEVVNAEEAFKMAGIESGFFELQPKEGLALVNGTAVGSGLASMVLFETNVLAVLSEVLSAIFAEVMQGKPEFTDHLTHKLKHHPGQIEAAAIMEHILDGSSYVKEAKKLHEMDPLQKPKQDRYALRTSPQWLGPHIEVIRASTKSIEREINSVNDNPLIDVSRNKALHGGNFQGTPIGVSMDNTRLAIAAIGKLMFAQFSELVNDFYNNGLPSNLSGSRNPSLDYGFKGAEIAMASYCSELQFLANPVTNHVESAEQHNQDVNSLGLISSRKTAEAVDILKLMSTTYLVALCQAIDLRHLEENLKSTVKKTVSHVAKKTLTTGANGELHPSRFCEKDLLKVVDREHVFAYIDDPCSATYPLMQKVRQVLVEHALNNGENEKNGSTSIFQKIGAFEEELKAVLPKEVESARDGVESGNPSIPNRIKECRSYPLYKFVREELGTGLLTGEKVRSPGEDFDKVFTAMCEGKIIDPLLDCLSAWNGAPLPIC

SEQ ID NO: 113 - protein, 713 aa, Jatropha curcas
  phenylalanine ammonia lyase (JcPAL)
MATIIGNGHQNGSLEGLCITRDPLSWGVAAESMKGSHLDEVKKMVSEYRKPLVKLGGETLTVAQVAAIASHDAGVKVELAESARAGVKASSDWVMDSMNKGTDSYGVTTGFGATSHRRTKQGAALQRELIRFLNAGIFGNGTETCHTLPHSATRAAMLVRINTLLQGYSGIRFEILEAITKLLNHNITPCLPLRGTITASGDLVPLSYIAGLLTGRPNSKAIGPSGESLDAVEAFRLADIDSGFFELQPKEGLALVNGTAVGSGLASMVLFEANVLAVLSEILSAIFAEVMNGKPEFTDHLTHKLKHHPGQIEAAAIMEHILDGSSYIKAAKQLHEIDPLQKPKQDRYALRTSPQWLGPQIEVIRFSTKSIEREINSVNDNPLIDVSRNKALHGGNFQGTPIGVSMDNARLAIASIGKLMFAQFSELVNDFYNNGLPSNLSGGRNPSLDYGFKGAEIAMASYCSELQFLANPVTSHVQSAEQHNQDVNSLGLISSRKTQEAIDILKLMSSTFLVALCQAIDLRHLEENLKHAVKNTVTQVAKRVLTTGANGELHPSRFCGKDLLKVVDREQVFAYIDDPCSATYPLMQKLRQVLVEHALANGENEKNASTSVFQKIGAFEEELKTLLPKEVESAREAYESGSAAIGNKIKECRSYPLYKFVREELGSGLLTGEKVRSPGEEFDKVFTAMCEGKIIDPMMECLKEWNGAPLPIC

SEQ ID NO: 114 - protein, 721 aa, Euphorbia pulcherrima
  poinsettia phenylalanine ammonia lyase (EpPAL)
MESIHQNGFKNGSLNSLCTDSESIRSHDPLSWGLAAESMKGSHLDEVKRMVAEFRKPVVKLGGETLTVAQVAAIAASNGSENIRVELAESARAGVKASSDWVMDSMNNGTDSYGVTTGFGATSHRRTKQGGALQKELIRFLNAGIFGNGTETSHILPHSATKAAMIVRINTLLQGYSGIRFEILEAITKLLNTNITPCLPLRGTITASGDLVPLSYIAGLLTGRSNSKATGPNGESLDAQQAFSEAGIDSGLFELQPKEGLALVNGTAVGSGLASMVLFDANILAVLSEVLSAIFAEVMNGKPEFTDHLTHKLKHHPGQIEAAAIMEHILDGSGYVKAAKKVHEMDPLQKPKQDRYALRTSPQWLGPQIEVIRFSTKSIEREINSVNDNPLIDVSRNKALHGGNFQGTPIGVSMDNARLAIASIGKLMFAQFSELVNDFYNNGLPSNLTAGRNPSLDYGFKGAEIAMASYCSELQYLANPVTSHVQSAEQHNQDVNSLGLISSRKTQESVDILKLMSTTFLVALCQAIDLRHMEENLRQTVKNTVSQVAKRVLTTGANGELHPSRFCEKELLKVVDREYVFAYADDPCSSTYPLMQKLRQVIVDHALLNGDNEKNANTSIFQKISAFEAELKTLLPKEVEAARAAYESGNAPIPNRIMECRSYPLYKFVREEQGTGILTGDKVRSPGEEFDKVFTAMCQGKIIDPLMDCLKEWNGAPLPIC

SEQ ID NO: 115 - protein, 725 aa, Trifolium pratense
  clover phenylalanine ammonia lyase (TpPAL)
MEAVAAAITKNNINDYDSFCLTHANANNMKVNGADPLNWGVAAEAMKGSHLDEVKRMVEEYRKPVVRLGGETLTISQVAAIAAHDGATVELSESARAGVKASSDWIMESMNKGTDSYGVTTGFGATSHRRTKQGGALQKELIRFLNAGIFGNGTESNHILPHTATRAAMLVRINTLLQGYSGIRFEILEAITKLLNNNITPCLPLRGTITASGDLVPLSYIAGLLTGRPNSKAHGPSGEILNAKEAFQLAGINADFFELQPKEGLALVNGTAVGSGLASIVLFEANILAVLSEVLSAIFAEVMQGKPEFTDHLTHKLKHHPGQIEAAAIMEHILDGSAYVKAAKKLHEIDPLQKPKQDRYALRTSPQWLGPLIEVIRFSTKSIEREINSVNDNPLIDVSRNKALHGGNFQGTPIGVSMDNTRLALASIGKLMFAQFSELVNDFYNNGLPSNLSASRNPSLDYGFKGSEIAMASYCSELQYLANPVTTHVQSAEQHNQDVNSLGLISSRKTKEAIEILQLMSSTFLIALCQAIDLRHLEENLKNSVKNTVSQVAKKTLTVGVNGELHPSRFCEKDLLKVVDREHVFSYIDDPCSATYPLSQKLRQVLVEHALVNGESEKNSNTSIFQKIATFEEELKTLLPKEVESARTAYESGNSTIANKINGCRSYPLYKFVREELGTSLLTGERVISPGEECDKLFTAMCQGKIIDPLLECLGEWNGSPLPIC

SEQ ID NO: 116 - protein, 637 aa, Lotus japonicus
  phenylalanine ammonia lyase (LjPAL5)
MAPTTNSNHESLNSSIFCTAAKAGSDPLSWGVAADSMKGSHLDEVKRMVAEYRKPVVKLGGETLTIAQVAAIAANDQGVSVELCESARAGVKASSDWVMNSMNNGTDSYGVTTGFGATSHRRTKNGNALQLELIRFLNAGIFGNGTETSHTLPQPATRAAMLVRINTLLQGYSGIRFEILEAITKLINNNITPCLPLRGTVTASGDLVPLSYIAGLLTGRQNSKAVGPSGEVVNAKEAFQLAGIDTGFFELQPKEGLALVNGTAVGSGLASIVLFDANVLAILAEVLSAIFAEVMEREINSVNDNPLIDVSRNKALHGGNFQGTPIGVSMDNTRLALAAIGKLMFAQFTELVDDHYNNGLPSNLTASRNPSLDYGLKGAEIAMASYCSELQYLANPVTTHVQSAEQHNQDVNSLGLISSRKTNEAIEILKLMSSTFLIALCQAIDLRHLEENLKHSVKSTVSQVAKRTLTTSVNGELHPSRFCEKDLLKVVDRETLFAYIDDPCSATYPLMQKLRQVLVDHALVNGENEKNSKTSIFQKIATFEDELKSLLPKEVESARAAYESGNPTIPNKINECRSYPLYKFVREELGTELLTGEKTRSPGEECDKLFTAICQGKIIDPLLECLGEWNGAPLPIC

SEQ ID NO: 117 - protein, 681 aa, Selaginella moellendorffii
  spike moss phenylalanine ammonia lyase (SmPAL)
MSGSHLEEVREMVHTVYGAAKPSFPIEGTTLTIAQVAAVAKRGAAAQVRLDSAAAKKRVDESSNWVLDNAMKGTDTYGVTTGFGATSHRRTNQGVELQRELIRFLNAGIFSEDDSTNVLPLAFARAAMLVRTNTLLQGYSGIRWEILSAMEKLVNSGIVARIPLRGTITASGDLVPLSYIAGLLTGRSNARAVLPDGKVVTSAEALKLVGVEQPFELQPKEGLAIVNGTAVGAAVASIACFDANVLALLAEILSAMFCEAMQGKPEFTDPLTHKLKHHPGQIEAAAIMEHVLAGSSYMKAAAKLHETDPLKKPKQDRYALRTSPQWLGPQIEVIRHATHSIQREINSVNDNPIIDVARDKALHGGNFQGTPIGVSMDNLRLAVAAIGKLMFAQFSELVNDFYNNGLPSNLSGGSNPSLDYGFKGAEIAMASYTSELQYLANPVTTHVQSAEQHNQDVNSLGLVSARKTVEALDILKLMSSTYLVALCQAIDLRHLEENLQATVKQTVSHAVKKTLTTGAAGALLPSRFCEKELLSVVDNQHVFTYIDDPASAGYPLMQKLRQVLVEHALKNIGDEKETSSSVLHKIGLFEEELKAALSVEVPAAREAYESGNAVLPNRIFDCASAPLYEFVRKGAGTALLMGTKSGTPGEDFTKVYDAICQGKLVTPLLKCLDGWSGTPSF

SEQ ID NO: 118 - protein, 505 aa, Artificial Sequence
  synthetic cinnamate 4-hydroxylase (C4H) consensus sequence (Majority)
  VARIANT (22)...(22): Xaa = Val, Leu, Ala, Thr, or Ile
  VARIANT (152)...(152): Xaa = Phe, Glu, Ala, Ser, Asp or Gln
  VARIANT (334)...(334): Xaa = Asn, His, Glu, Gln or Asp
  VARIANT (426)...(426): Xaa = Ser, Ala or Lys
  VARIANT (461)...(461): Xaa = Ile or Leu
MDLLLLEKTLLGLFAAVVVAIXVSKLRGKRFKLPPGPIPVPIFGNWLQVGDDLNHRNLTDLAKKFGDIFLLRMGQRNLVVVSSPELAKEVLHTQGVEFGSRTRNVVFDIFTGKGQDMVFTVYGEHWRKMRRIMTVPFFTNKVVQQYRYGWEXEAASVVEDVKKNPEAATNGIVLRRRLQLMMYNNMYRIMFDRRFESEDDPLFVKLKALNGERSRLAQSFEYNYGDFIPILRPFLRGYLKICKEVKERRLQLFKDYFVDERKKLASTKSTDSNGLKCAIDHILEAQQKGEINEDNVLYIVENINVAAIETTLWSIEWGIAELVNHPEIQKKLRXELDTVLGPGVQVTEPDLHKLPYLQAVIKETLRLRMAIPLLVPHMNLHDAKLAGYDIPAESKILVNAWWLANNPAHWKKPEEFRPERFLEEEXHVEANGNDFRYLPFGVGRRSCPGIILALPILGITXGRLVQNFELLPPPGQSKIDTTEKGGQFSLHILKHSTIVAKPRSF

SEQ ID NO: 119 - protein, 505 aa, Pinus taeda
  pine cinnamate 4-hydroxylase (PtC4H)
MDLLLLEKTLLGSFVAILVAILVSKLRGKRFKLPPGPIPVPVFGNWLQVGDDLNHRNLTDLAKKFGDIFLLRMGQRNLVVVSSPDLSKEVLHTQGVEFGSRTRNVVFDIFTGKGQDMVFTVYGEHWRKMRRIMTVPFFTNKVVQQYRYGWEEEAAQVVEDVKKNPEAATNGIVLRRRLQLMMYNNMYRIMFDRRFESEDDPLFNKLKALNGERSRLAQSFDYNYGDFIPILRPFLRGYLKICQEVKERRLQLFKDYFVDERKKLASTKNMNNEGLKCAIDHILDDQKKGEINEDNVLYIVENINVAAIETTLWSIEWGIAELVNHPEIQKKLRHELDTLLGPGHQITEPDTYKLPYLNAVIKETLRLRMAIPLLVPHMNLHDAKLGGFDIPAESKILVNAWWLANNPAHWKNPEEFRPERFLEEEAKVEANGNDFRYLPFGVGRRSCPGIILALPILGITLGRLVQNFELLPPPGQSKIDTAEKGGQFSLHILKHSTIVAKPRSF

SEQ ID NO: 120 - protein, 500 aa, Oryza sativa
  rice cinnamate 4-hydroxylase (OsC4H)
MDALLVEKVLLGLFVAAVLALVVAKLTGKRLRLPPGPAGAPIVGNWLQVGDDLNHRNLMALARRFGDILLLRMGVRNLVVVSSPDLAKEVLHTQGVEFGSRTRNVVFDIFTGKGQDMVFTVYGDHWRKMRRIMTVPFFTNKVVAQNRAGWEEEARLVVEDVRRDPAAATSGVVIRRRLQLMMYNDMFRIMFDRRFDSVDDPLFNKLKAFNAERSRLSQSFEYNYGDFIPVLRPFLRRYLARCHQLKSQRMKLFEDHFVQERKRVMEQTGEIRCAMDHILEAERKGEINHDNVLYIVENINVAAIETTLWSIEWGIAELVNHPSIQSKVREEMASVLGGAAVTEPDLERLPYLQAVVKETLRLRMAIPLLVPHMNLADGKLAGYDIPAESKILVNAWFLANDPKRWVRPDEFRPERFLEEEKAVEAHGNDFRFVPFGVGRRSCPGIILALPIIGITLGRLVQSFDLLPPPGMDKVDTTEKPGQFSNQILKHATVVCKPIDA

SEQ ID NO: 121 - protein, 501 aa, Zea mays
  maize cinnamate 4-hydroxylase (ZmC4H)
MDLALLEKALLGLFAAAVVAIAVAKLSGKRYRLPPGPPGAPVVGNWLQVGDDLNHRNLMAMAKRFGDIFLLRMGVRNLVVVSTPELAKEVLHTQGVEFGSRTRNVVFDIFTGKGQDMVFTVYGDHWRKMRRIMTVPFFTNKVVAQNRAGWEEEARLVVEDVRKDPEAAAGGVVLRRRLQLMMYNDMFRIMFDRRFDSEHDPLFNKLKALNAERSRLSQSFEYNYGDFIPVLRPFLRGYLNRCHDLKTRRMKFFEDNFVQERKKVMAQTGEIRCAMDHILEAERKGEINHDNVLYIVENINVAAIETTLWSIEWGIAELVNHPAIQHKLREELASVLGAGVPVTEPDLERLPYLQAIVKETLRLRMAIPLLVPHMNLNDGKLAGYDIPAESKILVNAWFLANDPKRWVRPDEFRPERFLEEEKSVEAHGNDFRFVPFGVGRRSCPGIILALPIIGITLGRLVQNFQLLPPPGLDKIDTTEKPGQFSNQIAKHATIVCKPLEA

SEQ ID NO: 122 - protein, 505 aa, Sorghum bicolor
  sorghum cinnamate 4-hydroxylase (SbC4H)
MDLLFVEKLLVGLFASVVVAIAVSKMRGRKLRLPPGPVPVPIFGNWLQVGDDLNHRNLAALARKFGDIFLLRMGQRNLVVVSSPPLAREVLHTQGVEFGSRTRNVVFDIFTGEGQDMVFTVYGDHWRKMRRIMTVPFFTNKVVQQYRHGWEAEAAAVVDDVRADPAAATEGVVLRRRLQLMMYNNMYRIMFDRRFESMDDPLFLRLRALNGERSRLAQSFEYNYGDFIPILRPFLRGYLRICKEVKETRLKLFKDFFLEERKKLASTKAVDSNGLKCAIDHILEAQQKGEINEDNVLYIVENINVAAIETTLWSIEWAIAELVNHPEIQQKLRQELDTVLAPGQQITEPDTHNLPYLQAVIKETLRLRMAIPLLVPHMNLHDAKLGGYDIPAESKILVNAWYLANNPESWKRPEEFRPERFLEEEKHVEANGNDFRYLPFGVGRRSCPGIILALPILGITIGRLVQNFELLPPPGQDKLDTTEKGGQFSLHILKHSNIVCKPRTF

SEQ ID NO: 123 - protein, 506 aa, Medicago truncatula
  cinnamate 4-hydroxylase (MtC4H)
MDLLLLEKTLLALFIAATIAITISKLRGKRFKLPPGPIPVPIFGNWLQVGDDLNHRNLTDYAKRFGEMFLLRMGQRNLVVVSSPELAKEVLHTQGVEFGSRTRNVVFDIFTGKGQDMVFTVYGEHWRKMRRIMTVPFFTNKVVQQYRYGWESEAESVVNDVKNNAEASIGGIVIRKRLQLMMYNIMYRIMFDRRFESEEDPLFVKLKALNGERSRLAQSFEYNYGDFIPILRPFLKGYLKVCKEVKDRRLQLFKDYFVDERKKLESTKSTTSNDGLKCAIDHILDAQKKGEINDDNVLYIVENINVAAIETTLWSIEWGIAELVNHQGIQNKVREEMDRVLGPGHQVTEPDLHKLPYLQAVIKETLRLRMAIPLLVPHMNLHDAKLNGFDIPAESKILVNAWWLANNPAHWKKPEEFRPERFLEEESHVEANGNDFRYLPFGVGRRSCPGIILALPILGITIGRLVQNFELLPPPGQSKIDTSEKGGQFSLHILKHSTIVAKPRSF

SEQ ID NO: 124 - protein, 501 aa, Triticum aestivum
  wheat cinnamate 4-hydroxylase (TaC4H)
MDVLLLEKALLGLFAAAVLAIAVAKLTGKRFRLPPGPSGAPIVGNWLQVGDDLNHRNLMGLAKRFGEVFLLRMGVRNLVVVSSPELAKEVLHTQGVEFGSRTRNVVFDIFTGKGQDMVFTVYGDHWRKMRRIMTVPFFTNKVVAQNRVGWEEEARLVVEDLKADPAAATAGVVVRRRLQLMMYNDMFRIMFDRRFESVADPLFNQLKALNAERSILSQSFDYNYGDFIPVLRPFLRRYLNRCTNLKTKRMKVFEDHFVQQRKEALEKTGEIRCAMDHILEAERKGEINHDNVLYIVENINVAAIETTLWSIEWGLAELVNHPEIQQKLREEIVAVLGAGVAVTEPDLERLPYLQSVVKETLRLRMAIPLLVPHMNLSDAKLAGYDIPAESKILVNAWFLANDPKRWVRADEFRPERFLEEEKAVEAHGNDFRFVPFGVGRRSCPGIILALPIIGITLGRLVQNFQLLPPPGQDKIDTTEKPGQFTNQILKHATIVCKPLEA

SEQ ID NO: 125 - protein, 506 aa, Glycine max
  soybean cinnamate 4-hydroxylase (GmC4H)
MDLLLLEKTLIGLFLAAVVAIAVSTLRGRKFKLPPGPLPVPIFGNWLQVGDDLNHRNLTDLAKKFGDIFLLRMGQRNLVVVSSPELAKEVLHTQGVEFGSRTRNVVFDIFTGKGQDMVFTVYGEHWRKMRRIMTVPFFTNKVVQQYRHGWESEAAAVVEDVKKNPDAAVSGTVIRRRLQLMMYNNMYRIMFDRRFESEEDPIFQRLRALNGERSRLAQSFEYNYGDFIPILRPFLKGYLKICKEVKETRLKLFKDYFVDERKKLGSTKSTNNNNELKCAIDHILDAQRKGEINEDNVLYIVENINVAAIETTLWSIEWGIAELVNHPEIQQKLRDEIDRVLGAGHQVTEPDIQKLPYLQAVVKETLRLRMAIPLLVPHMNLHDAKLGGYDIPAESRILVNAWWLANNPAHWKKPEEFRPERFFEEESLVEANGNDFRYLPFGVGRRSCPGIILALPILGITLGRLVQNFELLPPPGQSQIDTSEKGGQFSLHILKHSTIVAKPRSF

SEQ ID NO: 126 - protein, 505 aa, Nicotiniana tabacum
  tobacco cinnamate 4-hydroxylase (NtC4H)
MDLLLLEKTLIGLFFAILIALIVSKLRSKRFKLPPGPIPVPVFGNWLQVGDDLNHRNLTDYAKKFGDLFLLRMGQRNLVVVSSPELAKEVLHTQGVEFGSRTRNVVFDIFTGKGQDMVFTVYGEHWRKMRRIMTVPFFTNKVVQQYRGGWEFEVASVIEDVKKNPESATNGIVLRRRLQLMMYNNMFRIMFDRRFESEDDPLFVKLKALNGERSRLAQSFEYNYGDFIPILRPFLRGYLKICKEVKEKRLQLFKDYFVDERKKLSNTKSSDSNALKCAIDHILEAQQKGEINEDNVLYIVENINVAAIETTLWSIEWGIAELVNHPHIQKKLRDEIDTVLGPGVQVTEPDTHKLPYLQAVIKEALRLRMAIPLLVPHMNLHDAKLGGFDIPAESKILVNAWWLANNPAHWKKPEEFRPERFFEEEKHVEANGNDFRYLPFGVGRRSCPGIILALPILGITLGRLVQNFELLPPPGQSKLDTTEKGGQFSLHILKHSTIVLKPRSF

SEQ ID NO: 127 - protein, 505 aa, Solanum tuberosum
  potato cinnamate 4-hydroxylase (StC4H)
MDLLLLEKTLIGLFFAILIAIIVSKLRSKRFKLPPGPIPVPVFGNWLQVGDDLNHRNLTEYAKKFGDVFLLRMGQRNLVVVSSPELAKEVLHTQGVEFGSRTRNVVFDIFTGKGQDMVFTVYGEHWRKMRRIMTVPFFTNKVVQQYRGGWESEAASVVEDVKKNPESATNGIVLRKRLQLMMYNNMFRIMFDRRFESEDDPLFVKLRALNGERSRLAQSFEYNYGDFIPILRPFLRGYLKICKEVKEKRLKLFKDYFVDERKKLANTKSMDSNALKCAIDHILEAQQKGEINEDNVLYIVENINVAAIETTLWSIEWGIAELVNHPHIQKKLRDEIDTVLGPGMQVTEPDMPKLPYLQAVIKETLRLRMAIPLLVPHMNLHDAKLAGYDIPAESKILVNAWWLANNPAHWKKPEEFRPERFFEEEKHVEANGNDFRFLPFGVGRRSCPGIILALPILGITLGRLVQNFEMLPPPGQSKLDTSEKGGQFSLHILKHSTIVMKPRSF

SEQ ID NO: 128 - protein, 507 aa, Bambusa oldhamii
  bamboo cinnamate 4-hydroxylase (BoC4H)
MDLLFLEKLLVGLFASVVVAIAVSKIRGRKLRLPPGPLPVPIFGNWLQVGDDLNHRNLAALARKFGEIFLLRMGQRNLVVVSSPPLAREVLHTQGVEFGSRTRNVVFDIFTGKGQDMVFTVYGDHWRKMRRIMTVPFFTNKVVQQYHPGWEAEAAAVVDAVRADPKAATEGVVLRRHLQLMMYNNMYRIMFDRRFESMDDPLFLRLRALNGERSRLAQSFEYNYGDFIPILRPFLRGYLKTCKEVKETRLKLFKDFFLEERKKLASSKPMDSSGLKCAIDHILEAQQKGEINEDNVLYIVENINVAAIETTLWSIEWAIGELVNHPEIQRKLRHELDAVLGPGHQITEPDTHKLPYLQAVIKETLRLRMAIPLLVPHMNLHDAKLSGYDIPAESKILVNAWYLANNPDQWKRPEELRPERFLEEEKHVEANGNDFRYLPFGVGRRSCPGIILALPILGITIGRLVQNFELLPPPGQDKLDTAEKGGQFSLHILKHSNIVAKPRALEL

SEQ ID NO: 129 - protein, 505 aa, Brassica napus
  cinnamate 4-hydroxylase (BnC4H1)
MDLLLLEKSLIAVFAAVVLATVISKLRGKKLKLPPGPMPIPIFGNWLQVGDDLNHRNLVDYAKKFGDLFLLRMGQRNLVVVSSPNLTKEVLHTQGVEFGSRTRNVVFDIFTGKGQDMVFTVYGEHWRKMRRIMTVPFFTNKVVQQNREGWEFEAASVVEDVKKNPDSATKGIVLRKRLQLMMYNNMFRIMFDRRFDSEDDPLFIRLKALNGERSRLAQSFEYNYGDFIPILRPFLRGYLKICQDVKDRRLALFKKYFVDERKQIASSKPTGSEGLKCAIDHILVAQQKGEINEDNVLYIVENINVAAIETTLWSIEWGIAELVNHPEIQSKLRNEIDTVLGPGVQVTEPELHKLPYLQAVIKETLRLRMAIPLLVPHMNLNDAKLAGYDIPAESKILVNAWWLANNPESWKKPEEFRPERFFEEEAHVEANGNDFKYVPFGVGRRSCPGIILALPILGITIGRLVQNFELLPPPGQSKVDTSEKGGQFSLHILHHSTIVMKPRSF

SEQ ID NO: 130 - protein, 505 aa, Helianthus annuus
  sunflower cinnamate 4-hydroxylase (HaC4H)
MDLLLIEKTLVALFAAIIGAILISKLRGKKFKLPPGPIPVPIFGNWLQVGDDLNHRNLTDLAKRFGEILLLRMGQRNLVVVSSPELAKEVLHTQGVEFGSRTRNVVFDIFTGKGQDMVFTVYGEHWRKMRRIMTVPFFTNKVVQQYRYGWEAEAAAVVDDVKKNPAAATEGIVIRRRLQLMMYNNMFRIMFDRRFESEDDPLFLKLKALNGERSRLAQSFEYNYGDFIPILRPFLRNYLKLCKEVKDKRIQLFKDYFVDERKKIGSTKKMDNNQLKCAIDHILEAKEKGEINEDNVLYIVENINVAAIETTLWSIEWGIAELVNHPEIQAKLRHELDTKLGPGVQITEPDVQNLPYLQAVVKETLRLRMAIPLLVPHMNLHDAKLGGFDIPAESKILVNAWWLANNPDQWKKPEEFRPERFLEEEAKVEANGNDFRYLPFGVGRRSCPGIILALPILGITIGRLVQNFELLPPPGQSKIDTDEKGGQFSLHILKHSTIVAKPRSF

SEQ ID NO: 131 - protein, 505 aa, Ricinus communis
  cinnamate 4-hydroxylase (RcC4H)
MDPLLLEKTLLGLFAAVIVAIVISKLRGKRFKLPPGPLPVPVFGNWLQVGDDLNQRNLADLAKKFGDILLLRMGQRNLVVVSSPDLAKEVLHTQGVEFGSRTRNVVFDIFTGKGQDMVFTVYGEHWRKMRRIMTVPFFTNKVVQQYRYGWEDEAARVVEDVKKNPESATNGIVLRRRLQLMMYNNMYRIMFDRRFESEEDPLFVKLRALNGERSRLAQSFEYNYGDFIPILRPFLRGYLKICKEVKERRLQLFKDYFVDERKKLGSTKSMNNEGLKCAIDHILDAQQKGEINEDNVLYIVENINVAAIETTLWSIEWGIAELVNHPEIQKKLRDELDTVLGPGNQITEPDTYKLPYLQAVVKETLRLRMAIPLLVPHMNLHDAKLSGYDIPAESKILVNAWWLANNPANWKNPEEFRPERFLEEESKVEANGNDFRYLPFGVGRRSCPGIILALPILGITLGRLVQNFELLPPPGQSKLDTTEKGGQFSLHILKHSTIVAKPRSF

SEQ ID NO: 132 - protein, 505 aa, Vitis vinifera
  grape cinnamate 4-hydroxylase (VvC4H)
MDLILIEKALLAVFCAIILAITISKLLGKKLKLPPGPLPVPVFGNWLQVGDDLNHLNLSDLAKKFGDIFMLRMGQRNLVVVSSPDLAKDVLHTQGVEFGSRTRNVVFDIFTGKGQDMVFTVYGEHWRKMRRIMTVPFFTNKVVQQYRVGWEDEAARVVEDVKKNPEASTNGIVLRRRLQLMMYNNMYRIMFDRRFDSEEDPLFVKLKALNGERSRLAQSFEYNYGDFIPILRPFLRGYLKICKEVKERRLQLFKDHFLEERKKLASTKSTDHNSLKCAVDHILDAQQKGEINEDNVLYIVENINVAAIETTLWSIEWGIAELVNHPHIQKKLRDELNTVLGPGVQVTEPDIQKLPYLQAVIKETLRLRMAIPLLVPHMNLNDAKLGGYDIPAESKILVNAWWLANDSSKWKKPEEFRPERFLEEESKVEANGNDFRYLPFGVGRRSCPGIILALPILGITIGRLVQNFELLPPPGQAKLDTTGKGGQFSLHILKHSTIVARPIEA

SEQ ID NO: 133 - protein, 505 aa, Euphorbia pulcherrima; identical to SEQ ID NO: 131
  poinsettia cinnamate 4-hydroxylase (EpC4H)

SEQ ID NO: 134 - protein, 506 aa, Trifolium pratense
  clover cinnamate 4-hydroxylase (TpC4H)
MDLLLLEKTLLSLFIAAIIAITISKLRGKRFKLPPGPIPVPIFGNWLQVGDDLNHRNLTDLAKRFGEILLLRMGQRNLVVVSSPELAKEVLHTQGVEFGSRTRNVVFDIFTGKGQDMVFTVYGEHWRKMRRIMTVPFFTNKVVQQYRFGWESEAESVVNDVKKNSDASVGGIVIRRRLQLMMYNIMYRIMFDRRFESEEDPLFVKLKALNGERSRLAQSFEYNYGDFIPILRPFLKGYLKVCKEVKDRRLQLFKDYFVDERKKLESTKSTTSNDGLKCAIDHILDAQKKGEINDDNVLYIVENINVAAIETTLWSIEWGIAELVNHQEIQNKVREEMDRVLGPGHQVTEPDLQKLPYLQAVIKETLRLRMAIPLLVPHMNLHDAKLAGYDIPAESKILVNAWWLANNPALWKKPEEFRPERFLEEESHVEANGNDFRYLPFGVGRRSCPGIILALPILGITIGRLVQNFELLPPPGQSKIDTSEKGGQFSLHILKHSTVVAKPRSF

SEQ ID NO: 135 - protein, 531 aa, Selaginella moellendorffii
  spike moss cinnamate 4-hydroxylase (SmC4H)
MDRGSATLLAVAAMINVASAAEEAALAAAASSPLRLETVLFGLLALVLGAILASRALGPKLKLPPGPPAVPIFGNWLQVGDDLNHRNLAELAKKYGEIFLLKMGQRNLVVVSSPELAKEVLHTQGVEFGSRTRNVVFDIFTGKGQDMVFTVYGEHWRRMRRIMTVPFFTNKVVQQSRPVWEQEIEFVLKDLLANKEAQEGGTVIRRRLQLLMYNVMYKMMFDRRFESEDDPLFLKLRQLNGERSRLAQSFEYNYGDFIPILRPFLKRYLQMCKDVKENRLGLFKKYFLDERKQLLNAGKTGPDKVAIDHILEAQKQGEITEANVLYIVENINVAAIETTLWSMEWVIAELVNNRDIQDKVREELDRVLGPGVAITEPDIPKFTYLTAVIKETFRYHMAIPLLVPHMNLRPAKLAGYDIPAESKILVNAWWLGNNPELWDKPDVFDPSRFLDGKIEASGNDFRFLPFGVGRRSCPGIIIAMPLLHLVIGSLVAKFELLPPPGCDKIDVSEKGGQFSLHIAKHSTVVVKPRVL

SEQ ID NO: 136 - protein, 539 aa, Artificial Sequence
  synthetic 4-coumarate-CoA ligase (4CL) consensus sequence (Majority)
  VARIANT (4)...(4): Xaa = Gln, Ser, Glu, Pro, Met, Asp, Asn, Val or Ala
  VARIANT (6)...(6): Xaa = Ser, Asn, Lys, Glu, Pro, Lys, Ile, Ala or His
  VARIANT (51)...(51): Xaa = Glu, His, Gln, Arg, Asp, Ala or Thr
  VARIANT (52)...(52): Xaa = Val, Ile, Thr, Ser, Gln or Glu
  VARIANT (61)...(61): Xaa = Thr, Ile, Ala, Asn, Leu or Ser
  VARIANT (151)...(151): Xaa = Thr, Cys, Ala or Ser
  VARIANT (174)...(174): Xaa = Glu, Val or Ala
  VARIANT (202)...(202): Xaa = Lys or Arg
  VARIANT (291)...(291): Xaa = Glu, Ile, Asp, Met, Arg or Ala
  VARIANT (310)...(310): Xaa = Leu or Met
  VARIANT (318)...(318): Xaa = Ile, Val, Leu or Phe
  VARIANT (322)...(322): Xaa = Phe, Leu or Ile
  VARIANT (326)...(326): Xaa = Lys, Arg, Thr, Ile or Val
  VARIANT (357)...(357): Xaa = Ala or Ser
  VARIANT (437)...(437): Xaa = Leu or Ile
  VARIANT (456)...(456): Xaa = Gly, Asn, Ala, Thr or Ser
  VARIANT (509)...(509): Xaa = Asn, Lys, Cys or His
  VARIANT (520)...(520): Xaa = Ala, Ser or Asn
  VARIANT (539)...(539): Xaa = Met, Pro, Tyr, Val or His
EAKXVXQPEFIFRSKLPDIYIPNHLPLHSYCFENISEFADRPCLIDGATGXXYTYAEVELXSRRVAAGLRKLGVGQGDVVMLLLPNCPEFVFAFLGASRRGAITTTANPFYTPAEIAKQAKAAGAKLIVTQACYVEKVREFAAERGVPVVXIDGPEGCLHFSELTQADEEAPAXDIHPDDVVALPYSSGTTGLPKGVMLTHXGLVTSVAQQVDGENPNLYFHKEDVILCVLPLFHIYSLNSVLLCGLRVGAAILIMQKFEIGALLELVQRYKVTIAPFVPPIVLAIAKSPXVDAYDLSSIRMVMSGAAPXGKELEDAXRAKXPNAXLGQGYGMTEAGPVLAMCLAFAKEPFEVKSGXCGTVVRNAEMKIVDPDTGASLPRNQPGEICIRGEQIMKGYLNDPEATANTIDKDGWLHTGDIGYIDDDDELFIVDRLKEXIKYKGFQVAPAELEALLIXHPEISDAAVVPMKDELAGEVPVAFVVRSEGSEITEDEIKQFVSKQVVFYKRIXRVFFTDSIPKXPSGKILRKDLRARLAAGVX

SEQ ID NO: 137 - protein, 539 aa, Arabidopsis thaliana
  4-coumarate-CoA ligase (At4CL1)
MAPQEQAVSQVMEKQSNNNNSDVIFRSKLPDIYIPNHLSLHDYIFQNISEFATKPCLINGPTGHVYTYSDVHVISRQIAANFHKLGVNQNDVVMLLLPNCPEFVLSFLAASFRGATATAANPFFTPAEIAKQAKASNTKLIITEARYVDKIKPLQNDDGVVIVCIDDNESVPIPEGCLRFTELTQSTTEASEVIDSVEISPDDVVALPYSSGTTGLPKGVMLTHKGLVTSVAQQVDGENPNLYFHSDDVILCVLPMFHIYALNSIMLCGLRVGAAILIMPKFEINLLLELIQRCKVTVAPMVPPIVLAIAKSSETEKYDLSSIRVVKSGAAPLGKELEDAVNAKFPNAKLGQGYGMTEAGPVLAMSLGFAKEPFPVKSGACGTVVRNAEMKIVDPDTGDSLSRNQPGEICIRGHQIMKGYLNNPAATAETIDKDGWLHTGDIGLIDDDDELFIVDRLKELIKYKGFQVAPAELEALLIGHPDITDVAVVAMKEEAAGEVPVAFVVKSKDSELSEDDVKQFVSKQVKSCVLQENQQSVLH

SEQ ID NO: 138 - protein, 547 aa, Nicotiniana tabacum
  tobacco 4-coumarate-CoA ligase (Nt4CL1)
MPMETTTETKQSGDLIFRSKLPDIYIPKHLPLHSYCFENISEFSSRPCLINGANDQIYTYAEVELTCRKVAVGLNKLGIQQKDTIMILLPNSPEFVFAFMGASYLGAISTMANPLFTPAEVVKQAKASSAKIIITQSCFVGKVKDYASENDVKVICIDSAPEGCLHFSELTQSDEHEIPEVKIQPDDVVALPYSSGTTGLPKGVMLTHKGLVTSVAQQVDGENANLYMHSEDVLMCVLPLFHIYSLNSILLCGLRVGAAILIMQKFDIAPFLELIQKYKVSIGPFVPPIVLAIAKSPIVDSYDLSSVRTVMSGAAPLGKELEDAVRTKFPNAKLGQGYGMTEAGPVLAMCLAFAKEPFDIKSGACGTVVRNAEMKIVDPDTGCSLPRNQPGEICIRGDQIMKGYLNDPEATTRTIDKEGWLHTGDIGFIDEDDELFIVDRLKELIKYKGFQVAPAEIEALLLNHPNISDAAVVPMKDEQAGEVPVAFVVRSNGSAITEDEVKDFISKQVIFYKRVKRVFFVETVPKSPSGKILRKDLRARLAAGVPN

SEQ ID NO: 139 - protein, 544 aa, Eucalyptus camaldulensis
  4-coumarate-CoA ligase (Ec4CL)
MEAKPSEQPREFIFRSKLPDIYIPDNLSLHAYCFENISEFADRPCVINGATGRTYTYAEVELISRRVSAGLNGLGVGQGDVIMLLLQNCPEFVFAFLGASYRGAISTTANPFYTPGEIAKQASAARAKIVITQAAFADKVRPFAEENGVKVVCIDTAPEGCLHFSELMQADENAAPAADVKPDDVLALPYSSGTTGLPKGVMLTHRGQVTSVAQQVDGDNPNLYFHKEDVILCTLPLFHIYSLNSVMFCALRVGAAILIMQKFEIVALMELVQRYRVTILPIVPPIVLEIAKSAEVDRYDLSSIRTIMSGAAPMGKELEDTVRAKLPNAKLGQGYGMTEAGPVLAMCPAFAKEPFEIKSGACGTVVRNAEMKIVDPETGASLARNQAGEICIRGHQIMKGYLNDAEATANTIDKEGWLHTGDIGYIDDDDELFIVDRLKELIKYKGFQVAPAELEAMLIAHPSISDAAVVPMKDEVAGEVPVAFVVKSNGSVITEDEIKQYISKQVVFYKRIKRVFFTDAIPKAPSGKILRKDLRAKLASGVYN

SEQ ID NO: 140 - protein, 536 aa, Pinus taeda
  pine 4-coumarate-CoA ligase (Pt4CL1)
MNPQEEFIFRSKLPDIYIPKNLPLHSYVLENLSNHSSKPCLINGANGDVYTYADVELTARRVASGLNKIGIQQGDVIMLFLPSSPEFVLAFLGASHRGAIITAANPFSTPAELAKHAKASRAKLLITQACYYEKVKDFARESDVKVMCVDSAPDGCLHFSELTQADENEAPQVDISPDDVVALPYSSGTTGLPKGVMLTHKGLITSVAQQVDGDNPNLYFHSEDVILCVLPMFHIYALNSIMLCGLRVGAPILIMPKFEIGSLLGLIEKYKVSIAPVVPPVMMSIAKSPDLDKHDLSSLRMIKSGGAPLGKELEDTVRAKFPQARLGQGYGMTEAGPVLAMCLAFAKEPFDIKPGACGTVVRNAEMKIVDPETGASLPRNQPGEICIRGDQIMKGYLNDPEATSRTIDKEGWLHTGDIGYIDDDDELFIVDRLKELIKYKGFQVAPAELEALLIAHPEISDAAVVGLKDEDAGEVPVAFVVKSEKSQATEDEIKQYISKQVIFYKRIKRVFFIEAIPKAPSGKILRKNLKEKLAGI

SEQ ID NO: 141 - protein, 546 aa, Glycine max
  soybean 4-coumarate-CoA ligase (Gm4CL1)
MAPSPQEIIFRSPLPDIPIPTHLPLYSYCFQNLSQFHDRPCLIDGDTGETLTYADVDLAARRIASGLHKIGIRQGDVIMLVLRNCPQFALAFLGATHRGAVVTTANPFYTPAELAKQATATKTRLVITQSAYVEKIKSFADSSSDVMVMCIDDDFSYENDGVLHFSTLSNADETEAPAVKINPDELVALPFSSGTSGLPKGVMLSHKNLVTTIAQLVDGENPHQYTHSEDVLLCVLPMFHIYALNSILLCGIRSGAAVLILQKFEITTLLELIEKYKVTVASFVPPIVLALVKSGETHRYDLSSIRAVVTGAAPLGGELQEAVKARLPHATFGQGYGMTEAGPLAISMAFAKVPSKIKPGACGTVVRNAEMKIVDTETGDSLPRNKHGEICIIGTKVMKGYLNDPEATERTVDKEGWLHTGDIGFIDDDDELFIVDRLKELIKYKGFQVAPAELEALLIAHPNISDAAVVGMKDEAAGEIPVAFVVRSNGSEIAEDEIKKYISQQVVFYKRICRVFFTDSIPKAPSGKILRKVLTARLNEGLVVAN

SEQ ID NO: 142 - protein, 544 aa, Eucalyptus camaldulensis
  4-coumarate-CoA ligase (Ec4CL1)
MEAKPSEQPREFIFRSKLPDIYIPDNLSLHAYCFENISEFADRPCVINGATGRTYTYAEVELISRRVSAGLNGLGVGQGDVIMLLLQNCPEFVFAFLGASYRGAISTTANPFYTPGEIAKQASAAQAKIVITQAAYADKVRPFAEENGLRVVCIDTAPEGCLHFSELMQADENAAPAADVKPDDVLALPYSSGTTGLPKGVMLTHRGQVTSVAQQVDGDNPNLYFHKEDVILCTLPLFHIYSLNSVMFCALRVGAAILIMQKFEIMALMELVQRYRVTILPIVPPIVLAIAKSAEVDRYDLSSIRTIMSGAAPMGKELEDTVRAKLPNAKLGQGYGMTEAGPVLAMCLAFAKEPFEIKSGACGTVVRNAEMKIVDPETGASLPRNQAGEICIRGHQIMKGYLNDPEATANTIDKEGWLHTGDIGYIDDDDELFIVDRLKELIKYKGFQVAPAELEAMLIAHPSISDAAVVPMKDEVASEVPVAFVVKSNGSVITEDEIKQYISKQVVFYKRINRVFFTDAIPKAPSGKILRKDLRAKLASGVYN

SEQ ID NO: 143 - protein, 544 aa, Eucalyptus camaldulensis
  4-coumarate-CoA ligase (Ec4CL2)
MEAKPSEQPREFIFRSKLPDIYIPDNLSLHAYCFENISEFADRPCVINGATGRTYTYAEVELISRRVSAGLNGLGVGQGDMIMLLLQNCPEFVFAFLGASYRGAISTTANPFYTPGEIAKQASAAQAKIVITQAAYADKVRPFAEENGLSVVCIDTAPEGCLHFSELMQADENAAPAADVKPDDVLALPYSSGTTGLPKGVMLTHRGQVTSVAQQVDGDNPNLYFHKEDVILCTLPLFHIYSLNSVMFCALRVGAAILIMQKFEIMALMELVQRYRVTILPIVPPIVLAIAKSAEVDRYDLSSIRTIMSGAAPMGKELEDTVRAKLPNAKLGQGYGMTEAGPVLAMCLAFAKEPFEIKSGACGTVVRNAEMKIVDPETGASLPRNQAGEICIRGHQIMKGYLNDPEATANTIDKEGWLHTGDIGYIDDDDELFIVDRLKELIKYKGFQVAPAELEAMLIAHPSISDAAVVPMKDEVASEVPVAFVVKSNGSVITEDEIKQYISKQVVFYKRINRVFFTDAIPKAPSGKILRKDLRAKLASGVYN

SEQ ID NO: 144 - protein, 462 aa, Nicotiniana tabacum
  tobacco 4-coumarate-CoA ligase (Nt4CL2)
MEKDTKQVDIIFRSKLPDIYIPNHLPLHSYCFENISEFSSRPCLINGANKQIYTYADVELNSRKVAAGLHKQGIQPKDTIMILLPNSPEFVFAFIGASYLGAISTMANPLFTPAEVVKQAKASSAKIIVTQACHVNKVKDYAFENDVKIICIDSAPEGCLHFSVLTQANEHDIPEVEIQPDDVVALPYSSGTTGLPKGVMLTHKGLVTSVAQQVDGENPNLYIHSEDVMLCVLPLFHIYSLNSVLLCGLRVGAAILIMQKFDIVSFLELIQRYKVTIGPFVPPIVLAIAKSPMVDDYDLSSVRTVMSGAAPLGKELEDTVRAKFPNAKLGQGYGMTEAGPVLAMCLAFAKEPFEIKSGACGTVVRNAEMKIVDPKTGNSLPRNQSGEICIRGDQIMKGYLNDPEATNGSTITEDEVKDFISKQVIFYKRIKRVFFVDAIPKSPSGKILRKDLRAKLAAGLPN

SEQ ID NO: 145 - protein, 537 aa, Pinus taeda
  pine 4-coumarate-CoA ligase (Pt4CL)
MANGIKKVEHLYRSKLPDIEISDHLPLHSYCFERVAEFADRPCLIDGATDRTYCFSEVELISRKVAAGLAKLGLQQGQVVMLLLPNCIEFAFVFMGASVRGAIVTTANPFYKPGEIAKQAKAAGARIIVTLAAYVEKLADLQSHDVLVITIDDAPKEGCQHISVLTEADETQCPAVKIHPDDVVALPYSSGTTGLPKGVMLTHKGLVSSVAQQVDGENPNLYFHSDDVILCVLPLFHIYSLNSVLLCALRAGAATLIMQKFNLTTCLELIQKYKVTVAPIVPPIVLDITKSPIVSQYDVSSVRIIMSGAAPLGKELEDALRERFPKAIFGQGYGMTEAGPVLAMNLAFAKNPFPVKSGSCGTVVRNAQIKILDTETGESLPHNQAGEICIRGPEIMKGYINDPESTAATIDEEGWLHTGDVGYIDDDEEIFIVDRVKEIIKYKGFQVAPAELEALLVAHPSIADAAVVPQKHEEAGEVPVAFVVKSSEISEQEIKEFVAKQVIFYKKIHRVYFVDAIPKSPSGKILRKDLRSRLAAK

SEQ ID NO: 146 - protein, 554 aa, Oryza sativa
  rice 4-coumarate-CoA ligase (Os4CL3)
MGSVAAEEVVVFRSKLPDIEIDNSMTLQEYCFARMAEVGARPCLIDGQTGESYTYAEVESASRRAAAGLRRMGVGKGDVVMSLLRNCPEFAFSFLGAARLGAATTTANPFYTPHEVHRQAEAAGARVIVTEACAVEKVREFAAERGVPVVTVDGAFDGCVEFREVLAAEELDADADVHPDDVVALPYSSGTTGLPKGVMLTHRSLITSVAQQVDGENPNLYFSKDDVILCLLPLFHIYSLNSVLLAGLRAGSTIVIMRKFDLGALVDLVRKHNITIAPFVPPIVVEIAKSPRVTAEDLASIRMVMSGAAPMGKDLQDAFMAKIPNAVLGQGYGMTEAGPVLAMCLAFAKEPFKVKSGSCGTVVRNAELKIVDPDTGTSLGRNQSGEICIRGEQIMKGYLNDPEATKNTIDEDGWLHTGDIGFVDDDDEIFIVDRLKEIIKYKGFQVPPAELEALLITHPEIKDAAVVSMKDDLAGEVPVAFIVRTEGSEITEDEIKKFVAKEVVFYKRINKVFFTDSIPKNPSGKILRKDLRARLAAGIPDAVAAAAADAPKSS

SEQ ID NO: 147 - protein, 555 aa, Sorghum bicolor
  sorghum 4-coumarate-CoA ligase (Sb4CL)
MGSVDTAVAVPVPVPEPEAEEKAAVVFRSKLPDIEINNSQSLQTYCFGKMSEVADRACLIDGQTGASYTYAEVESLSRRAASGLRAMGVGKGDVVMNLLRNCPEFAFTFLGAARLGAATTTANPFYTPHEIHRQAEAAGAKVIVTEACAVEKVREFAAGRGVPVVTVDGRFDGCVEFAEVIAAEELDADADVHPDDVVALPYSSGTTGLPKGVMLTHRSLITSVAQQVDGENPNLYFSKDDVVLCLLPLFHIYSLNSVLLAGLRAGSTIVIMRKFDLGALVDLVRKHGITIAPFVPPIVVEIAKSPRVTADDLASIRMVMSGAAPMGKELQDAFMTKIPNAVLGQGYGMTEAGPVLAMCLAFAKEPFQVKSGSCGTVVRNAELKVVDPDTGAALGRNQPGEICIRGEQIMKGYLNDLESTKNTIDKDGWLHTGDIGYVDDDDEIFIVDRLKEIIKYKGFQVPPAELEALLITHPEIKDAAVVSMKDDLAGEIPVAFIVRTEGSEVTEDEIKQFVAKEVVFYKKIHKVFFTESIPKNPSGKILRKDLRARLAAGVH

SEQ ID NO: 148 - protein, 555 aa, Zea mays
  maize 4-coumarate-CoA ligase (Zm4CL)
MGSVDAAIAVPVPAAEEKAVEEKAMVFRSKLPDIEIDSSMALHTYCFGKMGEVAERACLIDGLTGASYTYAEVESLSRRAASGLRAMGVGKGDVVMSLLRNCPEFAFTFLGAARLGAATTTANPFYTPHEVHRQAEAAGARLIVTEACAVEKVREFAAERGIPVVTVDGRFDGCVEFAELIAAEELEADADIHPDDVVALPYSSGTTGLPKGVMLTHRSLITSVAQQVDGENPNLYFRKDDVVLCLLPLFHIYSLNSVLLAGLRAGSTIVIMRKFDLGALVDLVRRYVITIAPFVPPIVVEIAKSPRVTAGDLASIRMVMSGAAPMGKELQDAFMAKIPNAVLGQGYGMTEAGPVLAMCLAFAKEPYPVKSGSCGTVVRNAELKIVDPDTGAALGRNQPGEICIRGEQIMKGYLNDPESTKNTIDQDGWLHTGDIGYVDDDDEIFIVDRLKEIIKYKGFQVPPAELEALLITHPEIKDAAVVSMNDDLAGEIPVAFIVRTEGSQVTEDEIKQFVAKEVVFYKKIHKVFFTESIPKNPSGKILRKDLRARLAAGVH

SEQ ID NO: 149 - protein, 542 aa, Panicum virgatum
  switchgrass 4-coumarate-CoA ligase (Pv4CL)
MGSVDESAAAEVVFRSKLPDIEINNSQPLHAYCFGKMPEVAGRPCLIDGQTGASYTYAEVESLSRRAAAGLRRMGVGKGDVVMSLLRNCPEFAFAFLGAARLGAATTTANPFYTPHEIHRQAEAAGAKLIVTEACAVDKVREFAVARGIPVVTVDGRFDGCAEFAEVIAAEELEADADIQPDDVVALPYSSGTTGLPKGVMLTHRSLITSVAQQVDGENPNLHFRKDDVLLCLLPLFHIYSLNSVLLAGLRAGCAIVIMRKFETGALVELVRAHGVTVAPFVPPIVVEIAKSPRVGAADLASIRMVMSGAAPMGKDLQDAFMAKIPNAVLGQGYGMTEAGPVLAMCLAFAKEPFQVKSGSCGTVVRNAELKIVDPDTGAALGRNQPGEICIRGEQIMKGYLNDPESTKNTIDKDGWLHTGDIGYVDDDDEIFIVDRLKEIIKYKGFQVPPAELEALLITHPEIKDAAVVSMKDDLAGEIPVAFIVRTEGSQLTEDEIKQFVAKEVVFYKKIHKVFFTDSIPKNPSGKILRKDLRARLAAGVH

SEQ ID NO: 150 - protein, 559 aa, Oryza sativa
  rice 4-coumarate-CoA ligase (Os4CL4)
MGSMAAAAEAAQEEETVVFRSKLPDIEIPSHLTLQAYCFEKLPEVAARPCLIDGQTGAVYSYGEVEELSRRAAAGLRRLGVGKGDVVMSLLRNCPEFAFTFLGAARLGAATTTANPFYTPHEIHRQASAAGARVIVTEACAVEKVRGFAADRGIPVVAVDGDFDGCVGFGEAMLDASIEPLDADEEVHPDDVVALPYSSGTTGLPKGVMLTHRSLVTSVAQQVDGENPNLYFRREDVVLCLLPLFHIYSLNSVLLAGLRAGSAIVIMRKFDLGALVDLTRRHGVTVAPFVPPIVVEIAKSPRVTADDLASIRMVMSGAAPMGKDLQDAFMAKIPNAVLGQGYGMTEAGPVLAMCLAFAKEPFEVKSGSCGTVVRNAELKIVDPDTGATLGRNQSGEICIRGEQIMKGYLNDPESTKNTIDKGGWLHTGDIGYVDDDDEIFIVDRLKEIIKYKGFQVPPAELEALLITHPDIKDAAVVPMIDEIAGEVPVAFIVRIEGSAISENEIKQFVAKEVVFYKRLNKVFFADSIPKSPSGKILRKDLRAKLAAGIPTNDNTQLKS

SEQ ID NO: 151 - protein, 557 aa, Lolium perenne
  ryegrass 4-coumarate-CoA ligase (Lp4CL3)
MGSVPEESVVAVAPAETVFRSKLPDIEINNEQTLQSYCFEKMAEVASRPCIIDGQTGASYTYTEVDSLTRRAAAGLRRMGVGKGDVVMNLLRNCPEFAFSFLGAARLGAATTTANPFYTPHEIHRQAEAAGAKLIVTEACAVEKVLEFAAGRGVPVVTVDGRRDGCVDFAELIAGEELPEADEAGVLPDDVVALPYSSGTTGLPKGVMLTHRSLVTSVAQLVDGSNPNVCFNKDDALLCLLPLFHIYSLHTVLLAGLRVGAAIVIMRKFDVGALVDLVRAHRITIAPFVPPIVVEIAKSDRVGADDLASIRMVLSGAAPMGKDLQDAFMAKIPNAVLGQGYGMTEAGPVLAMCLAFAKEPFKVKSGSCGTVVRNAELKVVDPDTGASLGRNQPGEICVRGKQIMIGYLNDPESTKNTIDKDGWLHTGDIGLVDDDDEIFIVDRLKEIIKYKGFQVAPAELEALLLTNPEVKDAAVVGVKDDLCGEVPVAFIKRIEGSEINENEIKQFVSKEVVFYKRINKVYFTDSIPKNPSGKILRKDLRARLAAGIPTEVAAPRS

SEQ ID NO: 152 - protein, 537 aa, Selaginella moellendorffii
  spike moss 4-coumarate-CoA ligase (Sm4CL1)
MATDQHVAAEYIFRSKLPDIQIPNHVPLATYCLERAAADPELGGKAALIDGPTGTQMSYAQLGVAIRRVGAGLAKLGIGRGEVVMLLLPNSIEFVLVFLGCAVRGCVATTANPFYTPPEIAKQAKASGTKLIVTLSTYVDKVSGIAEVMSIDREVEGCLHISALTQADEGECPAVDIQPDDVVALPFSSGTTGLPKGVMLTHKSLVSSIAQQVDGDNPNLYMTPSDAVLCVLPMFHIYSLNSILLCSLRTASTIVIMPKFDLTQLLELVTRYSISIAPIVPPIVLALAKNPAVLAYDLSSIRMVQSGAAPLGKEIEDAFRARLPRATIGQGYGMTEAGPVVALCLAFAKHPFTVKPGSCGTIVRNADAKIVDPETGASLPRNQPGEMCIRGPQVMKGYLGDPESTRSTVDKDGWLHTGDVALIDDDDEVFIVDRVKEIIKYKGFQVAPAELEALLISNPSIADAAVVAKKDDLTGEVPVAFVVRAADSHISEDDIKGFVSKQVVFYKKIHSVYFVDSIPKNPSGKILRKELRSRLSS

SEQ ID NO: 153 - protein, 585 aa, Physcomitrella patens
  moss 4-coumarate-CoA ligase (Pp4CL1)
MSPSLLPQPTVSESTGESVMKKSLQSEVREASLAIGENLEPFLSETDAESQIMEPVHAEVHDFIYRSKLPDIDIPNHMPLADYCLEKSSQWPDKVCLIDGVTGREHRYGEIELSSRRVAAGLDKIGVKQGDVIALLLPNCAEFVLVFLGAAKRGAVVTTANPFYTAAELEKQIEASGAGIVITQSSYVEKLAGLNVQIITVDQHVANCMHISVLLNACEGECPQVRIHPDDLVCLPYSSGTTGLPKGVMLTHKSLVSSVSQQVDGEAPNFNITVEDTLMCVLPMFHIYSLNSILLCGLRVGATLVIMPKFELPKLLDLIQRHKVTMGPLVPPIVLAIAKNPIVENYDLSSMRMVMSGAAPLGKELEDAFRARLPNAVLGQGYGMTEAGPVLAMCLAFAKTPFSVKPGSCGTVVRNAEVKIVDTETGMSLPYNQPGEICIRGPQIMKGYLKNPEATANTIDKDGFLHTGDVAFIDEDEEMFIVDRVKEIIKFKGFQVPPAELEALLISHKEIQDAAVVSRKDDVAGEVPVAFVVRATSSTISEDEVKDYIAKQVVFYKKIHNVYFVDSIPKSPSGKILRKDLRNKV

SEQ ID NO: 154 - protein, 432 aa, Artificial Sequence
  synthetic hydroxycinnamoyl CoA:shikimate hydroxycinnamoyl transferase (HCT) consensus sequence (Majority)
  VARIANT (7)...(7): Xaa = Asp, Glu, Arg, Gly or Ser
  VARIANT (48)...(48): Xaa = Ser, Ala, Pro, Glu, Gly or Cys
  VARIANT (54)...(54): Xaa = Gln, Lys, Asp, Glu, Ala or Gly
  VARIANT (61)...(61): Xaa = Ser, Gly or Ala
  VARIANT (75)...(75): Xaa = Lys, Arg, Cys or Ala
  VARIANT (197)...(197): Xaa = Ala, Gln, Val, Ser, Thr or Lys
  VARIANT (211)...(211): Xaa = Ile, Thr, Ala, Val, Ser, Gly, His or Gln
  VARIANT (213)...(213): Xaa = Leu, Ala, Pro, Gln or Glu
  VARIANT (214)...(214): Xaa = Asp, Glu, Gln, Pro, Thr, Val or Ala
  VARIANT (215)...(215): Xaa = Pro, Thr, Asn or Ser
  VARIANT (221)...(221): Xaa = Asn, Ser, Glu, Gly, Val, Pro, Ala or Arg
  VARIANT (232)...(232): Xaa = Asp, Glu, Thr or Ser
  VARIANT (241)...(241): Xaa = Ser, Ala, Gly or Leu
  VARIANT (247)...(247): Xaa = Thr, Ile, Asn, Gly or Ala
  VARIANT (263)...(263): Xaa = Ser, Cys or Trp
  VARIANT (286)...(286): Xaa = Ser, Ala, Gly or Gln
  VARIANT (309)...(309): Xaa = Val, Ile, Glu or Leu
  VARIANT (323)...(323): Xaa = Gly, Ser, Ala or Thr
  VARIANT (330)...(330): Xaa = Val, Ala, Ser, Asp or Glu
  VARIANT (386)...(386): Xaa = Ile, Arg or Val
  VARIANT (399)...(399): Xaa = Ser, Gly, Ala or Val
MKINVRXSTMVRPAEETPRRRLWNSNVDLVVPRFHTPSVYFYRPTGAXNFFDGXVMKEALXKALVPFYPMAGRLXRDEDGRIEIDCNGEGVLFVEADADAVVDDFGDFAPTLELKRLIPTVDYTDGISSFPLLVLQVTYFKCGGVSLGVGMQHHAADGFSGLHFINTWSDMARGLDITIPPFIDRTLLRARDPPQPXFPHIEYQPAPAMKXSXXXQKAPPXTAVSIFKLTRXQLGRLKAKXKEGENXPRYSSYEMLAGHVWRXVCLARGLPDDQETKLYIATDGRXRLRPPLPPGYFGNVIFTATPLAXAGDLTSKPLWYAAXVIHDALXRMDNDYLRSALDYLELQPDLSALVRGAHTFRCPNLGITSWVRLPIHDADFGWGRPXFMGPGGIAYEGLXFVLPSPTNDGSLSVAISLQAEHMKLFEKFIYEI

SEQ ID NO: 155 - protein, 433 aa, Arabidopsis lyrata
  hydroxycinnamoyl CoA:shikimate hydroxycinnamoyl transferase (AlHCT)
MKINIRDSTMVRPAAETPITNLWNSNVDLVIPRFHTPSVYFYRPTGASNFFDPQIMKDALSKALVPFYPMAGRLKRDDDGRIEIDCNGAGVLFVVADTPSVIDDFGDFAPTLNLRQLIPDVDHSAGIHSFPLLVLQVTFFKCGGASLGVGMQHHAADGFSGLHFINTWSDMARGLDLTIPPFIDRTLLRARDPPQPAFHHVEYQPAPSMRIPLDPSKSGPDNTTVSIFKLSRDQLVALKAKSKEDGNIVSYSSYEMLAGHVWRSVGKARGLPDDQETKLYIATDGRSRLRPQLPPGYFGNVIFTATPLAVAGDLLSKPTWYAAGLIHDVLVRMDDNYLRSALDYLEMQPDLSALVRGAHTYKCPNLGITSWVRLPIYDADFGWGRPIFMGPGGIPYEGLSFVLPSPTNDGSLSVAIALQSEHMKLFEKFLYEI

SEQ ID NO: 156 - protein, 457 aa, Pinus taeda
  pine hydroxycinnamoyl CoA:shikimate hydroxycinnamoyl transferase (PtHCT)
MLPLHRTWGGRGIESINRALARGKMIINLKESTMVQPAEETPRRGLWNSNVDLVVPRFHTPSVYFYRPTGASNFFDAKVLKEALSKALVPFYPMAGRLRRDDDGRIEIDCNAEGVLFVEAGTASVVADFGDFAPTLELKQLIPTVDYSGGISTYPLLVLQVTYFKCGGVSLGVGMQHHAADGFSGLHFVNTWSDMARGLDLTIPPFIDRTLLRARDPPQPAFHHVEYQPPPAMKTVLETSKPESTAVSIFKLTRDQLNTLKAKAKEGGNNIGYSSYEMLAGHVWRSACKARGLPDDQETKLYIATDGRSRLRPTLPPGYFGNVIFTATPIAVAGEIQSKPTWYAAGKIHDSLVRMDNDYLRSALDFLELQPDLSALVRGAHTFRCPNLGITSWVRLPIHDADFGWGRPIFMGPGGIAYEGLSFIIPSSTNDGSLSVAISLQAEHMKLFEKFIYDIKE

SEQ ID NO: 157 - protein, 431 aa, Ricinus communis
  hydroxycinnamoyl CoA:shikimate pine hydroxycinnamoyl transferase (RcHCT)
MIINVKESTLVPPSEETPRVGLWNSNVDLVVPRFHTPSVYFYRPTGASNFFDPDVLKAALGKALVPFYPMAGRLRRDEDGRIEIDCNAEGVLLVVAETNAVVDDFGDFAPTLELKQLIPTVDYSGGISTFPLLVLQVTHFKCGGVSLGVGMQHHAADGFSGLHFVNTWSDMARGLDCTIPPFIDRTLLRARDPPQPQFNHIEYQPPPALKASAETLKPDSTTVSIFKLSRDQLNILKAKAKEDGNTINYSSYAMLAGHVWRSACKARGLTDDQETKLYIATDGRSRLNPPLPPGYFGNVIFTATPIAVAGDLESKPTWYAAGKIHDALARMDNDYLRSALDFLELQPDLSALVRGAHTFKCPNLGITSWVRLPIHDADFGWGRPIFMGPGGIAYEGLSFILPSPTNDGSLSVAIALQSEHMKLFEKFIYEL

SEQ ID NO: 158 - protein, 434 aa, Coffea canephora
  hydroxycinnamoyl CoA:shikimate hydroxycinnamoyl transferase (CcHCT)
MKIEVKESTMVRPAQETPGRNLWNSNVDLVVPNFHTPSVYFYRPTGSSNFFDAKVLKDALSRALVPFYPMAGRLKRDEDGRIEIECNGEGVLFVEAESDGVVDDFGDFAPTLELRRLIPAVDYSQGISSYALLVLQVTYFKCGGVSLGVGMRHHAADGFSGLHFINSWSDMARGLDVTLPPFIDRTLLRARDPPQPQFQHIEYQPPPALKVSPQTAKSDSVPETAVSIFKLTREQISALKAKSKEDGNTISYSSYEMLAGHVWRCACKARGLEVDQGTKLYIATDGRARLRPSLPPGYFGNVIFTATPIAIAGDLEFKPVWYAASKIHDALARMDNDYLRSALDYLELQPDLKALVRGAHTFKCPNLGITSWVRLPIHDADFGWGRPIFMGPGGIAYEGLSFILPSPTNDGSMSVAISLQGEHMKLFQSFLYDI

SEQ ID NO: 159 - protein, 429 aa, Vitis vinifera
  grape hydroxycinnamoyl CoA:shikimate hydroxycinnamoyl transferase (VvHCT)
MIINVRESTMVRPAEETPRRSLWNSNVDLVVPRMHTPSVYFYRPSGAANFFDPQVMKEALSKVLVPFYPMAGRLRRDEDGRIEIDCNAEGVLFVEADTGSVIDDFGDFAPTLELRQLIPTVDYSGDIGSYSLLILQVTHFKCGGVSLGVGMQHHVADGASGLHFINTWSDMARGLDITIPPFIDRTLLRARDPPQPAFHHIEYQPPPQLKTPLPNTQNTNVCIFRITRDQLNTLKNKSKEDGNTISYSSYVMLAGHVWRCACKARSLPADQDSKMYIATDGRSRLRPALPPGYFGNVIFTTTPVAVAGELMSKPLWYAASKIHNALARMDDEYLRSALDYLEIQPDLTALVRGAHTFRCPNIGITSWTRLPIYDADFGWGRPIFMGPGGIALEGLAFALPSPTNDGSLSIAISLQEDHMKLFQKYLYEI

SEQ ID NO: 160 - protein, 435 aa, Nicotiniana tabacum
  tobacco hydroxycinnamoyl CoA:shikimate hydroxycinnamoyl transferase (NtHCT)
MKIEVKESTMVKPAAETPQQRLWNSNVDLVVPNFHTPSVYFYRPTGSPNFFDGKVLKEALSKALVPFYPMAGRLCRDEDGRIEIDCKGQGVLFVEAESDGVVDDFGDFAPTLELRQLIPAVDYSQGIQSYALLVLQITHFKCGGVSLGVGMQHHAADGASGLHFINTWSDMARGLDLTIPPFIDRTLLRARDPPQPQFPHVEYQPPPTLKVTPENTPISEAVPETSVSIFKLTRDQINTLKAKSKEDGNTVNYSSYEMLAGHVWRSTCMARGLAHDQETKLYIATDGRSRLRPSLPPGYFGNVIFTTTPIAVAGDIQSKPIWYAASKLHDALARMDNDYLRSALDYLELQPDLKALVRGAHTFKCPNLGITSWSRLPIHDADFGWGRPIFMGPGGIAYEGLSFILPSPTNDGSQSVAISLQAEHMKLFEKFLYDF

SEQ ID NO: 161 - protein, 434 aa, Trifolium pratense
  clover hydroxycinnamoyl CoA:shikimate hydroxycinnamoyl transferase (TpHCT)
MIINVRDSTMVRPSEEVTRRTLWNSNVDLVVPNFHTPSVYFYRSNNGTSNFFDAKIMKEALSKVLVPFYPMAGRLRRDEDGRVEIDCDGQGVLFVEADTGAVIDDFGDFAPTLELRQLIPAVDYSRGIESYPLLVLQVTYFKCGGVSLGVGMQHHVADGASGLHFINTWSDVARGLDVSIPPFIDRTLLRARDPPRPVFDHIEYKPPPSMKTTQQSTKPGSDGAAVSIFKLTREQLSTLKAKSKEAGNTIHYSSYEMLAGHVWRSVCKARSLPDDQETKLYIATDGRARLQPPPPPGYFGNVIFTTTPIAIAGDLMSKPTWYAASRIHNALSRMDNDYLRSALDFLELQPDLKALVRGAHTFKCPNLGITSWARLPIHDADFGWGRPIFMGPGGIAYEGLSFIIPSSTNDGSLSVAIALQHEHMKVFKEFLYDI

SEQ ID NO: 162 - protein, 436 aa, Coffea canephora
  hydroxycinnamoyl CoA:shikimate hydroxycinnamoyl transferase (CcHCT)
MKIEVRESTMVRPAEETPRINLWNSNVDLVVPNFHTPSVYFYRPNGAANFFDPKVMKDALSRALVPFYPMGGRLKRDEDGRIEIDCQGQGVLFVEAESDGVIDDFGDFAPTLELRKLIPAVDYTLGIESYSLLVLQVTYFKCGGVSLGVGMQHHAADGASGLHFINTWSDLARGLDLAVPPFIDRTLLRSRDPPQPAFDHIEYQPAPPMKTAPTPTPTDDESVPETTVSIFKLTRDQVNALKGKSKEDGNTVNYSSYEMLSGHVWRCVCKARGLPDDQDTKLYIATDGRARLRPSLPRGYFGNVIFTTTPIAVAGDLQSKPTWYAASKIHDALARMDDDYLKSALDYLELQPDLKALVRGAHTFKCPNLGITSWARLPIHDADFGWGRPIFMGPGGIAYEGLSFVLPSPINDGSLSIVISLQAEHMKLFSKFLYDI

SEQ ID NO: 163 - protein, 442 aa, Oryza sativa
  rice hydroxycinnamoyl CoA:shikimate hydroxycinnamoyl transferase (OsHCT)
MAITVRRSTMVRPAWETPRVRLWNSNLDLVVPRFHTPSVYFYRRGPEGGGAPEGFFDGERMRRALAEALVPFYPMAGRLARDEDGRVEIDCNGEGVLFVEADAPDASVDDYGDFAPTMELKRLIPAVDYTDDISSFSLLVLQVTYFKCGGVSLGVGMQHHVADGMSGLHFINSWSDLCRGTQIAIMPFIDRTLLRARDPPTPSYPHVEYQPAPAMLSSVPQSVTANKTTPPPTAVDIFKLTRSDLGRLRSQLPSGEGAPRFSTYAVLAAHVWRCVSLARGLPSEQPTKLYCATDGRQRLQPPLPEGYFGNVIFTATPLAEAGKVTSGLADGAAVIQEALDRMNDSYCRSALDYLELQPDLSALVRGAHTFRCPNLGLTSWVRLPIHDADFGWGRPVFMGPGGIAYEGLAFVLPSANKDGSLSIAISLQAEHMEKFRKLIFEV

SEQ ID NO: 164 - protein, 442 aa, Oryza sativa
  rice hydroxycinnamoyl CoA:shikimate hydroxycinnamoyl transferase (OsHCT3)
MKINVRGSTMVRPAEETPRVRLWNSSLDLVVPRFHTPSVYFFRRGEAAAAEGGSYFDGERMRRALAEALVPFYPMAGRLAHDEDGRVEIDCNGEGVLFVEADAPGATVDDFGDFAPTMDLKRLIPTVDYTDGISSFPILVLQVTHFKCGGVALGVGMQHHVADGFSGLHFINSWADLCRGVPIAVMPFIDRTLVRARDPPAPSHPHVEYQPAPAMLAPEPPQALTAKPAPPPTAVDIFKLSRSDLGRLRSQLPRGEGAPRYSTYAVLAAHVWRCASLARGLPAEQPTKLYCATDGRQRLQPSLPDGYFGNVIFTATPLAEAGRVTGSLADGAATIQSALDRMDSGYCRSALDYLELQPDLSALVRGAHTFRCPNLGLTSWVRLPIHDADFGWGRPVFMGPGGIAYEGLAFVLPSASGDGSLSVAISLQAEHMEKFRKMIFDF

SEQ ID NO: 165 - protein, 441 aa, Sorghum bicolor
  sorghum hydroxycinnamoyl CoA:shikimate hydroxycinnamoyl transferase (SbHCT)
MVITVRRSTMVRPARETPRQRLWNSNLDLVVPRFHTPSVYFYRRGDGAAAPAEGFFDGERMRRALAEALVPFYPMAGRLARDEDGRVEIDCNGEGVLFVEADAPDVSVDDYGDFAPTMDLKRLIPTVDYTDDISAFPLLVLQVTHFKCGGISLGVGMQHHVADGMSGLHFINSWSDLCRGAQISVMPFIDRTLIRARDPPTPSFHHIEYQPAPAILSSTPQFLASKSKPPATAVDIFKLTRSDLGRLRSQLAAGEGAPRFSTYAVLAAHVWKCVSLARSLPPEQPTKLYCATDGRQRLQPPLPDGYFGNVIFTATPLAEAGKVTSGLAEGAAVIQGALDRMDNDYCRSALDYLELQPDLSALVRGAHTFRCPNLGLTSWVRLPIHDADFGWGRPVFMGPGGIAYEGLAFVLPSANGDGSLSIAISLQAEHMEKFRKLICEV

SEQ ID NO: 166 - protein, 440 aa, Zea mays
  maize hydroxycinnamoyl CoA:shikimate hydroxycinnamoyl transferase (ZmHCT)
MAITVRRSTMVRPARETPRQRLWNSNLDLVVPRFHTPSVYFYRRDGPVPDAEGFFDGERMRRALAEALVPFYPMAGRLARDEDGRVEIDCNGEGVLFVEADAPDASVDDYGDFAPTMELKRLIPTVDYTDDISAFSLLVLQVTYFKCGGVSLGVGMQHHAADGMSGLHFINSWSDLCRGAQISVMPFIDRTLLRARDPPTPSFQHIEYQSAPAMLSSTTQFLASKSKPPATAVDIFKLTRSDLGRLRSQLPAGEGAPRFSTYAVLAAHVWKCVSLARSLPPEQPTKLYCATDGRQRLQPPLPDGYFGNVIFTATPLAEAGKVTSELAEGAAVIQGALDRMDNDYCRSALDYLELQPDLSALVRGAHTFRCPNLGLTSWVRLPIHDADFGWGRPVFMGPGGIAYEGLAFVLPSANGDGSLSIAISLQAEHMEKFRKLIGEA

SEQ ID NO: 167 - protein, 442 aa, Zea mays
  maize hydroxycinnamoyl CoA:shikimate hydroxycinnamoyl transferase (ZmHCT2)
MAITVRRSTMVRPARETPRQRLWNSNLDLVVPRFHTPSVYFYRRDGPVPDAEGFFDGERMRRALAEALVPFYPMAGRLARDEDGRVEIDCNGEGVLFVEADAPDASVDDYGDFAPTMELKRLIPTVDYTDDISAFSLLVLQVTYFKCGGVSLGVGMQHHAADGMSGLHFINSWSDLCRGAQISVMPFIDRTLLRARDPPTPSFQHIEYQPAPAMLSSTTQFLASKSKPPATAVDIFKLTRSDLGRLRSQLPAGEGAPRFSTYAVLAAHVWKCVSLARSLPPEQPTKLYCATDGRQRLQPPLPDGYFGNVIFTATPLAEAGKVTSELAEGAAVIQGALDRMDNDYCRSALDYLDLQPDLSALVRGAHTFRCPNLGLTSWVRLPIHDADFGWGRPVFMGPGGIAYEGLAFVLPSANGDGSLSIAISLQAEHMEKFRKLIGGANC

SEQ ID NO: 168 - protein, 440 aa, Avena sativa
  oat hydroxycinnamoyl CoA:shikimate hydroxycinnamoyl transferase (AsHCT)
MKITVRSSTVVVPAAETPRVRLWNANPDLVVPRFHTPSVYFYRRGGDGDACCYFDAARMRRALAEALVPFYPMAGRLAHDEDGRVEIDCNAEGVLFVEADAPDGAVDDFGDFAPTMGLKRLIPTVDFTGGISSYPLLVVQVTHFKCGGVALGIGMQHHVADGFSGLHFINSWSDLCRGVPIAVMPFIDRTLLRARDPPVPTHPHIEYQPAPAMLGSEEPQALAGKPESPPTAVDIFKLSRSDLGRLRAQLPTGEGAPRFSTYAVLGAHVWRCASLARGLAPEQPTKLYCATDGRQRLTPTLPDGYFGNVIFTATPLAEAGKVTGSLADGATTIQDALEKMDDEYCHSALDYLELQPDLSALVRGAHTFRCPNLGLTSWVRLPIHDADFGWGRPVFMGPGGIAYEGLAFVLPSANRDGSLSVAISLQAEHMEKFRKMIFDF

SEQ ID NO: 169 - protein, 449 aa, Selaginella moellendorffii
  spike moss hydroxycinnamoyl CoA:shikimate hydroxycinnamoyl transferase (SmHCT1)
MEINVVRETMVRPAGATPQRVLWNSNVDLVIPRIHTASVYFYRPDPSGGEGYFEGGVLREALAKALVPFYPMAGRLKKDENGRFEINCNGEGVLLVEAAAANASVDEYARDFAPDVSFQRLIPSVDYTQDIGSFPLLVLQITRFKCGGASLGVGMEHHVADGMSGITFINTWAAMARGEDPKIVPYIDRTLLRANKPPIPKFPHVEYHPPPLLKHAAATNGHSNGKAKPQAGDDAPPRIAVGLFKFTKEQLQALKSQATDEETNTTYSSYEMLSGHIWRSMCLARGLDDDQETKLYIATDGRARVVPPLPKHYFGNVIFTCTPMALAGDLVSRPLYYAASVIHDAVSRMNDEYLRSALDYLELQPDLYKLVRGAHTFRSPNLGITSWSRLPVYDADFGWGRPVFMGPAVIAFEGLVYVLPSGTGDGSLSISLGLQPEHMPRFEQLIGQI

SEQ ID NO: 170 - protein, 451 aa, Selaginella moellendorffii
  spike moss hydroxycinnamoyl CoA:shikimate hydroxycinnamoyl transferase (SmHCT2)
MEINVVRETMVRPAEATPQRVLWNSNVDLVIPRIHTASVYFYRPDPSGGEGYFEGGVLREALAKALVPFYPMAGRLKKDENGRFEINCNGEGVLLVEAAAANASVDEYARDFAPDVSFQRLIPSVDYTQDIGSFPLLVLQITRFKCGGASLGVGMEHHVADGMSGITFINTWAAMARGEDPKIVPYIDRTLLRANKPPVPKFPHVEYHPPPLLKQAAATNGHSVSNGKAKPHTGDDAPPRIAVGLFKFTKEQLQALKSQATDEETNTTYSSYEMLSGHIWRSMCLARGLDDDQETKLYIATDGRARVVPPLPKHYFGNVIFTCTPMALAGDLVSRPLYYAASVIHNAVSRMNDEYLRSALDYLELQPDLYKLVRGAHTFRSPNLGITSWSRLPVYDADFGWGRPVFMGPAVIAFEGLVYVLPSGTGDGSLSISLGLQPEHMPRFEQLIGQI

SEQ ID NO: 171 - protein, 508 aa, Artificial Sequence
  synthetic coumaryol shikimate 3-hydroxylase (C3H) consensus sequence (Majority)
  VARIANT (6)...(6): Xaa = Ile, Thr, Val, Leu, Gly, Ser or Phe
  VARIANT (9)...(9): Xaa = Ala, Pro, Ser, Ile, Leu or Gly
  VARIANT (14)...(14): Xaa = Val, Leu, Ile, Phe, Trp, Ala or Pro
  VARIANT (16)...(16): Xaa = Ser, Ala, Thr, Gly, Phe, Leu, Val or Tyr
  VARIANT (57)...(57): Xaa = Ser, Ala, Lys, Thr or Arg
  VARIANT (156)...(156): Xaa = Arg, Lys, Met, Asn, His or Gln
  VARIANT (171)...(171): Xaa = Arg or Lys
  VARIANT (317)...(317): Xaa = Lys or Arg
  VARIANT (421)...(421): Xaa = Met or Ile
  VARIANT (483)...(483): Xaa = Tyr or Phe
MALLLXAIXLVAIXLXYKLYQRLRFKLPPGPRPWPVVGNLYDIKPVRFRCFAEWAQXYGPIISVWFGSTLNVVVSNSELAKEVLKENDQQLADRPRSRSAAKFSRNGQDLIWADYGPHYVKVRKVCTLELFTPKRLEALRPIREDEVTAMVESIFXDCTNPENEGKPLLVXKYLGAVAFNNITRLAFGKRFVNAEGVMDEQGVEFKAIVANGLKLGASLAMAEHIPWLRWMFPLEEEAFAKHGARRDRLTRAIMEEHTLARQKSGGAKQHFVDALLTLQDKYDLSEDTIIGLLWDMITAGMDTTAISVEWAMAELIXNPRVQQKAQEELDRVIGRDRVMTETDFSNLPYLQCVAKEALRLHPPTPLMLPHKANANVKIGGYDIPKGSNVHVNVWAVARDPAVWKNPLEFRPERFLEEDVDXKGHDFRLLPFGAGRRVCPGAQLGINLVTSMLGHLLHHFEWAPPEGVKPEDIDMTENPGLVTXMRTPLQAVATPRLPSELYKRVPVDM

SEQ ID NO: 172 - protein, 509 aa, Eucalyptus globulus
  coumaryol shikimate 3-hydroxylase (EgC3H)
MALPLILLSIPLLFLLLAHQLYQRLRFKLPPGPRAWPVVGNLYDIKPVRFRCFAEWSQAYGPIISVWFGSTLNVVVSSSELAKEVLKENDQQLADRHRSRSAAKFSRDGQDLIWADYGPHYVKVRKVCTLELFTPKRLEALRPIREDEVTAMVESIFKDCTNPDNSGKTLLVKKYLGAVAFNNITRLAFGKRFMNAEGVIDEQGLEFKAIVSNGLKLGASLAMAEHIPWLRWMFPLEEEAFAKHSARRDRLTRAIMEEHTVARQKSGAKQHFVDALLTLKDKYDLSEDTIIGLLWDMITAGMDTTAISVEWAMAELIKNPRVQQKAQEELDRVVGFERVVTEPDFSNLPYLQCIAKEALRLHPPTPLMLPHRSNSHVKIGGYDIPKGSNVHVNVWAIARDPAVWNSPLEFRPERFLEEDVDMKGHDFRLLPFGAGRRVCPGAQLGINLVTSMLGHLLHHFVWTPPQGTKPEEIDMSENPGLVTYMSTPVQAVATPRLPSELYKRVPYEM

SEQ ID NO: 173 - protein, 511 aa, Ricinus communis
  coumaryol shikimate 3-hydroxylase (RcC3H)
MAFPLIVTIPISILLLILTYKLYYRLRFKLPPGPRPWPIVGNLYDIKPVRFRCFAEWAQAYGPIISVWFGSTLNVIVSNTELAKEVLKEHDQQLADRHRSRSAAKFSRDGKDLIWADYGPHYVKVRKVCTLELFTPKRLDALRPIREDEVTAMVESIFMDCTNPENNGKSVLVKKYLGAVAFNNITRLAFGKRFVNAEGIMDEQGKEFKAIVANGLKLGASLAMAEHIPWLRWMFPLEEDAFAKHGARRDRLTRAIMEEHTLARQKSGGAKQHFVDALLTLQQKYDLSEDTIIGLLWDMITAGMDTTAITVEWAMAELIKNPRVQQKVQEELDRVIGFERVLTEADFSSLPYLQCIAKEGLRLHPPTPLMLPHRANSNVKIGGYDIPKGSNVHVNVWAVARDPAIWKSPEEFRPERFLEEDVDMKGHDFRLLPFGAGRRICPGAQLGINLVTSMLGHLLHHFRWTPPEGVKPEEIDMSENPGLVTYMRTPLQAVATPRLPSELYKRVAVDM

SEQ ID NO: 174 - protein, 508 aa, Vitis vinifera
  grape coumaryol shikimate 3-hydroxylase (VvC3H)
MALLLVLISITAIFLAYKLYQRLRFKLPPGPHPWPIVGNLYDIKPVRFRCFAEWSQAYGPIISVWFGSTLNVIVSNSELAKEALKEKDQQLADRHRSRSAAKFSRDGKDLIWADYGPHYVKVRKVCTLELFSPKRLEALRPIREDEVTAMVESIFKDVTNPENLGKSILLKKYLGAVAFNNITRLAFGKRFMNSEGVIDEQGLEFKAIVANGLKLGASLAMAEHIPWLRWMFPLEEEAFAKHGARRDRLTRAIMEEHTLAREKSGGAKQHFVDALLTLQDKYDLSEDTIIGLLWDMITAGMDTTAISVEWAMAELIKNPRVQQKVQAELDHVIGLDRVMSESDFSNLPYLQSVAKEALRLHPPTPLMLPHRANANVKIGGYDIPKGSNVHVNVWAVARDPAVWKDPEEFRPERFLEEDVDMKGHDFRLLPFGAGRRVCPGAQLGINLVTSMLGHLLHHFNWAPPEGVNPEDLDMSENPGLVSYMRTPLQAIPTSRLPASLYKRMAVDI

SEQ ID NO: 175 - protein, 509 aa, Glycine max
  soybean coumaryol shikimate 3-hydroxylase (GmC3H)
MALLLIIPISLVTLWLGYTLYQRLRFKLPPGPRPWPVVGNLYDIKPVRFRCFAEWAQSYGPIISVWFGSTLNVIVSNSELAKEVLKEHDQLLADRHRSRSAAKFSRDGKDLIWADYGPHYVKVRKVCTLELFSPKRLEALRPIREDEVTSMVDSVYNHCTSTENLGKGILLRKHLGVVAFNNITRLAFGKRFVNSEGVMDEQGVEFKAIVENGLKLGASLAMAEHIPWLRWMFPLEEGAFAKHGARRDRLTRAIMAEHTEARKKSGGAKQHFVDALLTLQDKYDLSEDTIIGLLWDMITAGMDTTAISVEWAMAELIRNPRVQQKVQEELDRVIGLERVMTEADFSNLPYLQCVTKEAMRLHPPTPLMLPHRANANVKVGGYDIPKGSNVHVNVWAVARDPAVWKDPLEFRPERFLEEDVDMKGHDFRLLPFGSGRRVCPGAQLGINLAASMLGHLLHHFCWTPPEGMKPEEIDMGENPGLVTYMRTPIQAVVSPRLPSHLYKRVPAEI

SEQ ID NO: 176 - protein, 509 aa, Trifolium pratense
  clover coumaryol shikimate 3-hydroxylase (TpC3H)
MALFLTIPLSLITIFLFYTLFQRLRFKLPPGPRPWPVVGNLYDIKPVRFRCFAEWAQSYGPIISVWFGSTLNVIVSNSELAKEVLKEKDQQLADRHRSRSAAKFSRDGQDLIWADYGPHYVKVRKVCTLELFSPKRIEALRPIREDEVTAMVESIFNDSTNSENLGKGILMRKYIGAVAFNNITRLAFGKRFVNSEGVMDEQGVEFKAIVANGLKLGASLAMAEHIPWLRWMFPLEEEAFAKHGARRDRLTRAIMDEHTQARQKSGGAKQHFVDALLTLQDKYDLSEDTIIGLLWDMITAGMDTTAISVEWAMAELIKNPRVQKKAQEELDKVIGFERVMTETDFSSLPYLQSVAKEALRLHPPTPLMLPHRANANVKIGGYDIPKGSNVHVNVWAVARDPAVWKNATEFRPERFLEEDVDMKGHDFRLLPFGAGRRVCPGAQLGINMVTSMLGHLLHHFCWAAPEGVNPEDIDMTENPGMVTYMRTPLQVVASPRLPSELYKRVPADI

SEQ ID NO: 177 - protein, 509 aa, Medicago truncatula
  coumaryol shikimate 3-hydroxylase (MtC3H)
MALFLTIPLSFIAIFLFYTLFQRLRFKLPPGPRPWPVVGNLYDIKPVRFRCFAEWAQSYGPIISVWFGSTLNVIVSNSKLAKEVLKENDQQLADRHRSRSAAKFSRDGQDLIWADYGPHYVKVRKVCTLELFSPKRIEALRPIREDEVTAMVESIFNDSTNSENLGKGILMRKYIGAVAFNNITRLAFGKRFVNSEGVMDEQGVEFKAIVANGLKLGASLAMAEHIPWLRWMFPLEEEAFAKHGARRDRLNRAIMEEHTQARQKSGGAKQHFVDALLTLQEKYDLSEDTIIGLLWDMITAGMDTTAISVEWAMAELIKNPRVQQKAQEELDKVIGFERVMTETDFSSLPYLQCVAKEALRLHPPTPLMLPHRANTNVKIGGYDIPKGSNVHVNVWAVARDPAVWKDATEFRPERFLEEDVDMKGHDFRLLPFGAGRRVCPGAQLGINMVTSMLGHLLHHFCWAPPEGVNPAEIDMAENPGMVTYMRTPLQVVASPRLPSELYKRVTADI

SEQ ID NO: 178 - protein, 508 aa, Coffea canephora
  coumaryol shikimate 3-hydroxylase (CcC3H)
MALFLLLLTFIFILPPYYLYQKLRFKLPPGPRPLPVVGNLYDIKPVRFRCFADWSRAYGPIISVWFGSTLNVVVSNAELAKEVLKENDQQLSDRHRSRSAAKFSREGQDLIWADYGPHYVKVRKVCTLELFSPKRLEALKPIREDEVTAMVESIYKDCTLREGSGQSLLVKKYLGTVAFNNITRLAFGKRFVNSEGVMDEQGKEFKEITANGLKLGASLAMAEHIPWLRWLFPLDEAAFAKHGARRDRLTRAIMEEHRLAREKSGGAKQHFVDALLTLKDKYDLSEDTIIGLLWDMITAGMDTTAISVEWAMAEVIKNPRVQQKVQEELDQVIGYERVMIETDFSNLPYLQSVAKESLRLHPPTPLMLPHRSNASVKIGGYDIPKGSNVHVNVWAVARDPAVWRNPLEFRPERFLEEDVDMKGHDFRLLPFGAGRRVCPGAQLGINLVTSMLGHLLHHFNWAPPHGLSPDEIDMGESPGLVTYMRTALRAVPTPRLPSHLYERVAVDM

SEQ ID NO: 179 - protein, 512 aa, Osimum basilicum
  basil coumaryol shikimate 3-hydroxylase (ObC3H)
MAALLLLLLLPLLLPAIFLLHHLYYRLRFRLPPGPRPLPIVGNLYDVKPVRFRCFADWAQSYGPIISVWFGSTLNVIVSNTELAKEVLKEKDQQLADRHRSRSAAKFSRDGQDLIWADYGPHYVKVRKVCTLELFSPKRLEALRPIREDEVTAMVESIYHDCTAPDNAGKSLLVKKYLGAVAFNNITRLAFGKRFVNSEGIIDKQGLEFKAIVSNGLKLGASLAMAEHIPSLRWMFPLDEDAFAKHGARRDQLTREIMEEHTRAREESGGAKQHFFDALLTLKDKYDLSEDTIIGLLWDMITAGMDTTAISVEWAMAELIKNPRVQQKAQEELDRVIGYERVMTELDFSNLPYLQCVAKEALRLHPPTPLMLPHRSNSNVKIGGYDIPKGSNVHVNVWAVARDPAVWKNPCEFRPERFLEEDVDMKGHDFRLLPFGAGRRVCPGAQLGINLVTSMIGHLLHHFNWAPPSGVSSDELDMGENPGLVTYMRTPLEAVPTPRLPSDLYKRIAVDL

SEQ ID NO: 180 - protein, 512 aa, Pinus taeda
  pine coumaryol shikimate 3-hydroxylase (PtC3H)
MPVPEMGPIGGVVTGIVAIAIVYKLVQWWRFKLPPGPRPWPVVGNLLQIKPVRFRCFWDWSKKYGPIMSVWFGSTLNVVVSSTELAKEVLKEHDQQLADRPRSRSAEKFSRHGQDLIWADYGPHYVKVRKVCTLELFSPKRLEALRPVREDEVAAMVESIFNDCSKQEGIGKPLVVKKYLSAVAFNNITRIAFGKRFVNEEGKMDPQGLEFKEIVATGLKLGASLTMAEHIPYLRWMFPLEEGAFAKHGARRDNVTKAIMEEHTLARQTSGAKQHFVDALLTLQEKYDLSEDTIIGLLWDMITAGMDTTAITVEWAMAELVRNPRIQQKAQEEIDRVVGRDRVLNETDFPHLPYLQCITKEALRLHPPTPLMLPHKATQNVKIGGYDIPKGSNVHVNVWAVARDPAVWKDPVTFRPERFIEEDVDIKGHDYRLLPFGAGRRICPGAQLGINLVQSMLGHLLHHFEWAPPEGMKAEDIDLTENPGLVTFMAKPVQAIAIPRLPAHLYKRQPLN

SEQ ID NO: 181 - protein, 512 aa, Pinus taeda
  pine coumaryol shikimate 3-hydroxylase (PtC3H)
MSVPEMGPFGVVVTGIVAIAIVYKLVQRWRFKLPPGPRPWPVVGNLLQIEPVRFRCFWDWSKKYGPIMSVWFGSTLNVVVSNTELAKEVLKEHDQQLADRPRSRSAEKFSRNGQDLIWADYGPHYVKVRKVCTLELFSPKRLEALRPIREDEVAAMVESIFNDCGKQEGIGKPLVVKRYLSGVAFNNITRPAFGKRFVNEEGKMDPQGVEFKEIVATGLKLGASLTMAEHIPYLRWMFPLEEGAFAKHGARRDNVTKAIMEEHTLARQTSGAKQHFVDALLTLQEKYDLSEDTIIGLLWDMITAGMDTTAITVEWAMAELVRNPRIQQKAQEEIDRVVGRDRVMNETDFPHLPYLQCITKEALRLHPPTPLMLPHKATQNVKIGGYDIPKGSNVHVNVWAIARDPAVWKDPVTFRPERFLEEDVDIKGHDYRLLPFGAGRRICPGAQLGINLVQSMLGHLLHHFVWAPPEGMQAEDIDLTENPGLVTFMAKPVQAIAIPRLPDHLYKRQPLN

SEQ ID NO: 182 - protein, 508 aa, Nicotiniana tabacum
  tobacco coumaryol shikimate 3-hydroxylase (NtC3H)
MALSFIFISITLIFLVHKLYHRLRFKLPPGPRPLPVVGNLYDIKPVRFRCFADWAKTYGPIFSVYFGSQLNVVVTTAELAKEVLKENDQNLADRFRTRPANNLSRNGMDLIWADYGPHYVKVRKLCNLELFTPKRLEALRPIREDEVTAMVENIFKDCTKPDNTGKSLLIREYLGSVAFNNITRLTFGKRFMNSKGEIDEQGQEFKGIVSNGIKIGGKLPLAEYVPWLRWFFTMENEALVKHSARRDRLTRMIMDEHTLARKKTGDTKQHFVDALLTLQKQYDLSDDTVIGLLWDMITAGMDTTTITVEWAMAELVKNPRVQLKAQEELDRVIGTDRIMSETDFSKLPYLQCVAKEALRLHPPTPLMLPHKASASVKIGGYDIPKGSIVHVNVWAVARDPAVWKNPLEFRPERFLEEDVDMKGHDYRLLPFGAGRRVCPGAQLAINLVTSMLGHLLHHFTWAPAPGVNPEDIDLEESPGTVTYMKNPIQAIPTPRLPAHLYGRVPVDM

SEQ ID NO: 183 - protein, 508 aa, Ginkgo biloba
  coumaryol shikimate 3-hydroxylase (GbC3H)
MSPLSSVLIGFVVILVVYKVVQWKRYKLPPGPRPLPVVGNLLDIAPVRFRCFSEWSQKYGPIMSVWFGSTLNVIVCNTELAKEVLKENDQLLADRPRSRSSEKFSRNGQDLIWADYGPHYVKVRKVCTLELFTPKRLESLRPVREDEVAAMVESIFKDCGSQEGVGKTVMVKKYPSAVAFNNITRIAFGKRFVNGEGKMDPQGIEFKEIVGTGLKLGASLTMAEHIPYLRWMFPLEEGAFAKHGARRDNLTKAIMEEHTLARQKSGAKQHFVDALLTLQEKYDLSMDTIIGLLWDMITAGMDTPAITVEWPMAELVRNPRVHQKAHEELDRVIGKDRVINETDFAHLPYLQCITKEALRLHPPTPLMLPHKAIENVKIGGYDIPKGSNVHVNVWAIARDPAVWKDPVAFRPERFIEEDVDIKGHDYRLLPFGAGRRVCPGAQLGLNLVQSMLGHLLHHFIWAPPEGMKSEGIDLTESPGLVTFMAKPVEAFAIPRLPAPLYKREPVNW

SEQ ID NO: 184 - protein, 512 aa, Sorghum bicolor
  sorghum coumaryol shikimate 3-hydroxylase (SbC3H)
MDASLLLSVALAVVLIPLSLALLNRLRLGRLPPGPRPWPVLGNLRQIKPIRCRCFQEWAERYGPVISVWFGSGLTVVVSTSELAKEVLKENDQQLADRPRNRSTQRFSRNGQDLIWADYGPHYIKVRKLCNLELFTPKRLEALRPIREDEVTAMVESVYRAATAPGNEGKPMVVRNHLSMVAFNNITRLAFGKRFMNANGDIDEQGREFKTIVNNGIKIGASLSVAEFIWYLRWLCPLNEELYKTHNERRDRLTMKIIEEHAKSLKESGAKQHFVDALFTLKQQYDLSEDTVIGLLWDMITAGMDTTVISVEWAMAELVRNPRVQKKLQEELDRVVGRDRVMLETDFQNLPYLQAVVKESLRLHPPTPLMLPHKASTNVKIGGYDIPKGANVMVNVWAVARDPKVWSNPLEYRPERFLEENIDIKGSDFRVLPFGAGRRVCPGAQLGINLVASMIGHLLHHFEWSLPEGTRPEDVNMMESPGLVTFMGTPLQAVAKPRLEKEELYNRVPVEM

SEQ ID NO: 185 - protein, 512 aa, Zea mays
  maize coumaryol shikimate 3-hydroxylase (ZmC3H)
MDASLLLSVGLALVLIPLSLSLLNRLRVGRLPPGPRPWPVLGNLRQIKPVRCRCFQEWAERYGPIISVWFGSGLTVVVSTSELAKEVLKENDQQLADRPRNRSTQRFSRNGQDLIWADYGPHYIKVRKLCNLELFTPRRLEALRPIREDEVTAMVESVHRAATAPGNEGKPMVVRKHLSMVAFNNITRLAFGKRFMNANGDVDEQGREFKTIVNNGIKIGASLSVAEFIWYLRWLCPLNEELYKTHNERRDRLTMKIIDEHAKSLKESGAKQHFVDALFTLKQQYDLSEDTVIGLLWDMITAGMDTTVISVEWAMAELVRNPRVQKKLQEELDRVVGRDRVMLETDFQNLPYLQAVVKESLRLHPPTPLMLPHKASSNVKIGGYNIPKGANVMVNVWAVARDPKVWSNPLEYRPERFLEENIDIKGSDFRVLPFGAGRRVCPGAQLGINLVASMIGHLLHHFEWSLPEGTRPEDVNMMESPGLVTFMGTPLQAVVKPRLEKEELYNRVPVEM

SEQ ID NO: 186 - protein, 512 aa, Oryza sativa
  rice coumaryol shikimate 3-hydroxylase (OsC3H)
MDVASLLPFALALVAIPISLALLDRLRLGRIPPGPRPWPMVGNLWQIKPVRCRGFLEWAERYGPIVSVWFGSSLNVVVSTSELAKEVLKENDQLLADRPRNRSTQRFSRNGMDLIWADYGPHYIKVRKLCNLELFTPKRLEALRPIREDEVTAMVESVHRAVTQPGSEHKPIVVRNHLAMVAFNNITRLAFGKRFMNANGDIDEQGREFKTIVNNGIKIGASLSVAEYIWYLRWLCPLNEELYKTHNERRDRLTKKIIDEHAKALKESGAKQHFVDALFTLREQYDLSDDTVIGLLWDMITAGMDTTVISVEWAMAELVRNPRVQKKLQEELDRVVGRDRVMSETDFQSLPYLNAVVKESLRLHPPTPLMLPHKASTNVKIGGYNIPKGANVMVNVWAIARDPKVWSNPLEYRPERFIEENIDIKGSDFRVLPFGAGRRVCPGAQLGINLVASMIGHLLHQFEWSLPEGTRPEDVNMMESNGVVTFMSTSLQVIAKPRLDNPDLYKRFPVEM

SEQ ID NO: 187 - protein, 512 aa, Triticum aestivum
  wheat coumaryol shikimate 3-hydroxylase (TaC3H)
MDVASLLPFAIALVAIPISLALLDRLRLGRLPPGPRPWPVVGNLRQIKPVRCRCFQEWAARYGPIISVWFGSSLTVVVSTSELAKEVLKEHDQQLADRPRNRSTQRFSRNGQDLIWADYGPHYIKVRKLCNLELFTQKRLEALRPIREDEVTAMVESVHRAAAGPGNEGKPLVVRNHLAMVSFNNITRLAFGKRFMNADGDIDEEGQEFKLIVNNGIKIGASLSVAEYIWYLRWLCPLNEELYNTHNERRDRLTKKIIEEHAQALRESGAKQHFVDALFTLREKYDLSDDTVFGLLWDMITAGMDTTVISVEWAMAELVRNPRVQKKLQEELDSVVGRDRVMSETDFQNLPYLMAVVKESLRLHPPTPLMLPHKASASVKVGGYSIPKGANVMVNVWAVARDPKVWSSPLEFRPERFLEESIDIKGSDFRVLPFGAGRRVCPGAQLGINLVASMIGHMLHHFEWSLPEGARPEDISMMESPGLVTFMGTLLQAVATPRLENEELYKRVPVEI

SEQ ID NO: 188 - protein, 513 aa, Oryza sativa
  rice coumaryol shikimate 3-hydroxylase (OsC3H)
MDTPALLPLALALVAIPIVILLFNRIRPGRLPPGPRAWPVVGNLFDIHPVRCRCFMEWAGKYGPIMTVWLGTSPTVVVSTSELAREVLKNNDQQLADRPRNRSSERFSRGGVDLIWADYGPHYIKVRKLCNLELFAPRRMEALRPIREDEVTAMVESIYRAITAPGEEGKPMVMRKHLSMVAFNNITRLTFGKRFIDAAGELDEQGSELKAIVNNGIKIGASLTIAEHIRVLRWLNPVDEELYNAHSARRDRFTRRIMDEHARELERHGAKQHFVDALFTLRDKYDLSDDTVIGLLWDMITAGTDTTVITVEWAMAELARNPRVQMKAQEELDRVIGRGRVMLEADIPNLPYLQAVVKESFRLHPPTPLMLPHKASTSVKIAGYDVPKDASVVVNVWAVARDPGVWDNPLEYRPERFLEESIDIKGSDYRVLPFGAGRRVCPGAQLGISLVASMIGHLLHQFTWALPDGTRPEDLDMMESPGLVTFMATPLQVVAMPRLDKEELFKRVPVDMS

SEQ ID NO: 189 - protein, 524 aa, Selaginella moellendorffii
  spike moss coumaryol shikimate 3-hydroxylase (SmC3H)
MDPSAEAYHHHHHHYTEFVPPDHGHRYSTWTIPVGLFLVYLTFKLLSRPRLPPGPKPWPIIGSLHRVSPVRFRCFMDWAEKHGPIMSVWMGTNLNVVISNAELAKEVLKEKDKELASRPLTRAAARFSRNGQDLIWADYGDHYVKVRKLCTLELFTPKRLESLRWIREEEVGAMVKSIFQDVKNNGGAAVTVKNYVSAVAFNNITRIVFGKRFVDENGEMLPQGVEFKAIISQGMKLGASLTMAEHISFIRWMFPLQEEEFAKHGARRDSLTKEIMEEHALEKKKSGTSQEHFVDALLNLKDQYGLSETTVIGLLWDMITAGMDTTAISAEWAMAEIIKHPKVQEKAHEEMDRVIGKERIITEVDVQQLPYLQSIVKEALRLHPTTPLMLPHKATTRVKIGGYDIPKGTIVHVNVYAIGRDPKVWKRASVFRPERFLEEDVDIKGHDYRLLPFGAGRRICPGAQLGLNMVQLMVARLLHQFSWAPPPGVKPEKIDLTERPGVVTFMANPVQAVATPRLAEKLYE

SEQ ID NO: 190 - protein, 487 aa, Physcomitrella patens
  moss coumaryol shikimate 3-hydroxylase (FpC3H)
MYKSLRSSHKLPPGPRPLPVVGNLTHITPVRFKCFMEWAQTYGSVLSVWMGPTLNVVVSSADAAKEMLKERDHALSSRPLTRAAARFSRNGQDLIWADYGPHYVKVRKVCTLELFTFKRLESLKPVREDEVGAMVAALFKDCADSRPLNLKKYVSAMAFNNITRIVFGKRFVDDKGNIDNQGVEFKEIVSQGMKLGASLKMSEHIPYLRWMFPLQEEEFAKHGARRDNLTKAIMQEHRLQSQKNGPGHHFVDALLSMQKQYDLSETTIIGLLWDMITAGMDTTAISVEWAIAELVRNPDVQVKAQQELDQVVGQDRVVTEADFSQLPYLQAVAKEALRLHPPTPLMLPHKATETVKIGGYDVPKGTVVHCNVYAISRDPTVWEEPLRFRPERFLEEDIDIKGHDYRLLPFGAGRRVCPGAQLGLNMVQLMLARLLHHFSWAPPPGVTPAAIDMTERPGVVTFMAAPLQVLATPRLRAALYKNGSSPS

SEQ ID NO: 191 - protein, 338 aa, Artificial Sequence
  synthetic cinnamoyl-CoA reductase (CCR) consensus sequence (Majority)
  VARIANT (7)...(7): Xaa = Val, Pro, Ser, Lys, Ala or Glu
  VARIANT (8)...(8): Xaa = Ala, Pro, Leu, Ser, Gln or Val
  VARIANT (9)...(9): Xaa = Ser, Thr, Val, Pro or Lys
  VARIANT (40)...(40): Xaa = Lys, Arg or His
  VARIANT (79)...(79): Xaa = Ala, Glu, Asp, Ser, Asn or Arg
  VARIANT (85)...(85): Xaa = Asp, His or Gln
  VARIANT (114)...(114): Xaa = Asn, Thr, Val, Ile, Asp, Ser or Lys
  VARIANT (179)...(181): Xaa = Lys, Arg or Asn
  VARIANT (223)...(223): Xaa = Leu, Ser, Tyr, Ala or His
  VARIANT (331)...(331): Xaa = Glu, Asp or Gln
  VARIANT (337)...(337): Xaa = Gly, Gln, His, Lys or Arg
MTVDAAXXXGNGQTVCVTGAGGFIASWLVKLLLEKGYTVXGTVRNPDDPKNAHLRELEGAAERLTLCKADLLDYDSLCXAIQGCXGVFHTASPVTDDPEQMVEPAVRGTKNVIXAAAEAKVRRVVFTSSIGAVYMDPNRGPDVVVDESCWSDLEFCKNTKNWYCYGKAVAEQAAWEAAXEXGVDLVVVNPVLVLGPLLQPTVNASIAHILKYLTGSAKTYANXVQAYVHVRDVALAHILVFESPSASGRYLCAESVLHRGDVVEILAKLFPEYPVPTKCSDEVNPRKKPYKFSNQKLRDLGLEFTPVKQCLYETVKSLQEKGHLPVPAQQXGGIAIXA

SEQ ID NO: 192 - protein, 332 aa, Solanum lycopersicum
  tomato cinnamoyl-CoA reductase (SlCCR)
MPSVSGRVVCVTGAGGFIASWLVKLLLEKGYTVRGTVRNPDDPKNCHLRELEGAKERLTLCRGDLLDYQSLREAINGCDGVFHTASPVTDDPEQMVEPAVIGTKNVITAAAEANVRRVVFTSSIGAVYMDPSRDPEKVVDETCWSDPDFCKNTKNWYCYGKMVAEQAAWDEAREKGVDLVAINPVLVLGPLLQNTVNASVLHILKYLTGSAKTYANSVQAYVHVKDVALAHILLYETPSASGRYLCAESVLHRGDIVEILAKFFPEYPIPTKCSDVTKPRVKPYKFSNQKLKDLGMEFTPVKQCLYETVKSLQEKGHLPIPTQKDEIIRIQT

SEQ ID NO: 193 - protein, 336 aa, Euphorbia pulcherrima
  poinsettia cinnamoyl-CoA reductase (EpCCR)
MPVDALPGSGQTVCVTGAGGFIASWIVKLFLERGYTVRGTVRNPDDPKNGHLRELEGASERLTLYKGDLMDYESLREAIMGCDGVVHTASPVTDDPEQMVEPAVIGTKNVIVAAAEAKVRRVVFTSSVGAITMDPNRGPDVVVDESCWSDLDFCKSTKNWYCYGKAVAEKSACAEAKERGVDLVVINPVLVLGPLLQSTVNASIIHILKYLTGSAKTYANSVQAYVHVKDVALAHILVFETPSASGRYLCAESVLHRGDVVEILAKFFPEYNLPTKCSDEVNPRVKPYKFSNQKLRDLGLEFTPVKQCLYETVKSLQERGHLAVPSPPEDSVRIQR

SEQ ID NO: 194 - protein, 331 aa, Solanum tuberosum
  potato cinnamoyl-CoA reductase (StCCR)
MPSESGKVVCVTGAGGFIASWLVKLLLEKGYTVRGTVRNPDDPKNGHLKELEGKERLILLRADLLDYQSLREAIYGCDGVFHTASPVTDDPEQMVEPAVIGTKNVITAAAEAKVGRVVFTSSIGTVYMDPNRAPDKVVDETCWSDLGFCKNTKNWYCYGKTVAEKTAWDEAREKGVDLVVINPVLVLGPLLQPTVNASVLHILKYLTGSAKTYANSIQAYVHVKDVALAHILLYEAPSASGRYICAESVLHRGDVVEILAKFFPEYPIPTKCSDETRPRAKPYKFTNQKLKDLGLGFTPVKQCLYETVKSLQEKGHLPIPTQNDEPIKIHS

SEQ ID NO: 195 - protein, 336 aa, Eucalyptus gunnii
  cinnamoyl-CoA reductase (EgCCR)
MPVDALPGSGQTVCVTGAGGFIASWIVKLLLERGYTVRGTVRNPDDPKNGHLRELEGASERLTLYKGDLMDYGSLEEAIKGCDGVVHTASPVTDDPEQMVEPAVIGTKNVIVAAAEAKVRRVVFTSSIGAVTMDPNRGPDVVVDESCWSDLEFCKSTKNWYCYGKAVAEKAAWPEAKERGVDLVVINPVLVLGPLLQSTINASIIHILKYLTGSAKTYANSVQAYVHVKDVALAHVLVLETPSASGRYLCAESVLHRGDVVEILAKFFPEYNVPTKCSDEVNPRVKPYKFSNQKLRDLGLEFTPVKQCLYETVKSLQEKGHLPVPSPPEDSVRIQG

SEQ ID NO: 196 - protein, 338 aa, Vitis vinifera
  grape cinnamoyl-CoA reductase (VvCCR)
MPIDASSPSSSGQIVCVTGAGGFIASWIVKLLLERGYTVKGTVRNPDDPKNSHLRELEGAKERLILCKADLMDYESLKEAINGCHGVFHTASPVTDDPEEMVEPAVNGTKNVIIAAAEAKVRRVVFTSSIGAVYMDPNRSPDQVVDESCWSDLEFCKNTKNWYCYGKAVAEQAAWEVAKEKEVDLVVVNPVLVLGPLLQSTVNASIIHILKYLTGSAKTYANSVQAYVHVKDVALAHILVFEAPSASGRYLCAESVLHRGDVVEILAKFFPEYPIPTKCSDEVKPRAKPYKFSNQKLRELGLEFIPVKQCLYETVKTLQEKGHVPVPPQHDDSLRIQS

SEQ ID NO: 197 - protein, 339 aa, Ricinus communis
  cinnamoyl-CoA reductase (RcCCR)
MPAADTSSLSGHGQTVCVTGAGGFIASWIVKLLLEKGYTVRGTVRNPDDPKNVHLRELEGANERLTLCRADLLDFQSLRDAIMGCDGVFHTASPVTDDPEQMVEPAVNGTKNVIIAAAEAKVRRVVFTSSIGAVYMDPNRGPDVVVDESCWSDLEFCKNTKNWYCYGKAVAEQAAWEEAKEKGLDLVVVNPVLVLGPLLQPTINASIIHILKYLTGSAKTYANYVQAYVHVKDVALAHILVYETPSASGRYLCAESVLHRGEVVEILAKFFPEYPIPTKCSDEKNPRAKPYKFSNQKLKDLGLEFTPVKQCLYETVRNLQERGHLPIPKQAEDSVRIQA

SEQ ID NO: 198 - protein, 338 aa, Pinus taeda
  pine cinnamoyl-CoA reductase (PtCCR)
MPVDASSLSGQGQTICVTGAGGFIASWMVKLLLDKGYTVRGTARNPADPKNSHLRELEGAQERLTLCKADLLDYESLKEAIQGCDGVFHTASPVTDDPEEMVEPAVNGTKNVIIAAAEAKVRRVVFTSSIGAVYMDPNKGPDVVIDESCWSDLEFCKNTKNWYCYGKAVAEQAAWDMAKEKGVDLVVVNPVLVLGPLLQPTVNASIVHILKYLTGSAKTYANSVQAYVHVRDVALAHILVFETPSASGRYLCSESVLHRGEVVEILAKFFPEYPIPTKCSDEKNPRKQPYKFSNQKLRDLGFEFTPVKQCLYETVKSLQERGHLPIPKQAAEESVKIQ

SEQ ID NO: 199 - protein, 338 aa, Pinus taeda
  pine cinnamoyl-CoA reductase (PtCCR)
MPVDASSLSGQGQTICVTGGGGFIASWMVKLLLDKGYTVRGTARNPADPKNSHLRELEGAEERLTLCKADLLDYESLKEGIQGCDGVFHTASPVTDDPEEMVEPAVNGTKNVIIAAAEAKVRRVVFTSSIGAVYMDPNKGPDVVIDESCWSDLEFCKNTKNWYCYGKAVAEQAAWDMAKEKGVDLVVVNPVLVLGPLLQPTVNASITHILKYLTGSAKTYANSVQAYVHVRDVALAHILVFETPSASGRYLCSESVLHRGEVVEILAKFFPEYPIPTKCSDEKNPRKQPYKFSNQKLRDLGFEFTPVKQCLYETVKSLQEKGHLPIPKQAAEESLKIQ

SEQ ID NO: 200 - protein, 338 aa, Glycine max
  soybean cinnamoyl-CoA reductase (GmCCR)
MPSSESSTGFSETICVTGAGGFIASWMVKLLLEKGYTVRGTLRNPDDPKNGHLKEFEGASQRLTLHKVDLLHLDSVRSVINGCHGVFHTASPVTDNPEEMVEPAVNGAKNVIIAAAEAKVRRVVFTSSIGAVYMDPKRSIDLVVDESCWSDLEFCMNTKNWYCYGKAVAEEAAWDTAKEKGVDMVVVNPVLVLGPLLQPSINASTIHILKYLTGFGKTYANATQGYVHVRDVALAHILVYEKPSAFGRYICAESSFHRGELVEILAKYFPDYPVPTKCSDEKNPRAKPYTFSNQKMKDLGLEFPPVSQCLYEAVKNLQEKGHLPVPARQQEDSTTVKP

SEQ ID NO: 201 - protein, 322 aa, Picea abies
  spruce cinnamoyl-CoA reductase (PaCCR)
MTAGKQTGAGQTVCVTGAGGFIASWLVKLLLERGYTVRGTVRNPEDQKNAHLRQLEGAEERLTLVKADLMDYNSLLNAITGCQGVFHVASPVTDDPVQMVEPAVNGTKNVLDACAEAAVRRVVFTSSIGAVYMDPTRDYDALVDESCWSNLDFCKDTKNWYCYGKAVAEKAAWDRAKEKGLDLVVVNPCVVLGPVLQSSINASILHILKYLTGSAKTYANSVQAYVHVRDVAEAHILVYESPSASGRYLCAESVLHRGDVVELLEKMFPQYPIPTKCKDDGKPRVKPWKVSNQKLKDLGLEFTPAKQCLYETVISLQEKGHI

SEQ ID NO: 202 - protein, 324 aa, Pinus massoniana
  pine cinnamoyl-CoA reductase (PmCCR)
MTAGKQTEEGQTGCVTGAGGFIASWLVKLLLERGYTVRGTVRNPEDQKNAHLKQLEGAEERLTLVKADLMDYNSLLNAINGCQGVFHVASPVTDDPEEMVEPAVNGTKNVLDACAVAGVRRVVFTSSIGAVYMDPSRDYDALVDENCWSNLDYCKETKNWYCYGKTVAEKAAWERAKDKGLDLVVVNPCVVLGPVLQSSINASIIHILKYLTGSAKTYANSVQAYVHVRDVAEAHILVYESPSASGRYLCAESVLHRGDVVDLLASMFPQYPIPTKVKEDGKPRVKPWKVSNQKLKDLGLEFTPAKQCLYETVISLQEKGHISK

SEQ ID NO: 203 - protein, 361 aa, Oryza sativa
  rice cinnamoyl-CoA reductase (OsCCR)
MTVIDGAVAADAGGAAAAVVQPGNGQTVCVTGAAGYIASWLVKLLLEKGYTVKGTVRNPDDPKNAHLKALDGAGERLVLCKADLLDYDAICRAVAGCHGVFHTASPVTDDPEQMVEPAVRGTEYVINAAAEAGTVRRVVFTSSIGAVTMDPNRGPDVVVDESCWSDLDYCKETRNWYCYGKAVAEQAAWEAARRRGVELVVVNPVLVIGPLLQPTVNASVAHILKYLDGSASKFANAVQAYVDVRDVAAAHLLVFESPSAAGRFLCAESVLHREGVVRILAKLFPEYPVPTRCSDEKNPRKQPYKMSNQKLRDLGLEFRPASQSLYETVKCLQEKGHLPVLAAEKTEEEAGEVQGGIAIRA

SEQ ID NO: 204 - protein, 362 aa, Lolium perenne
  ryegrass cinnamoyl-CoA reductase (LpCCR)
MTIAEVVAAGDTAAAVVQPAGNGQTVCVTGAAGYIASWLVKLLLEKGYTVKGTVRNPDDPKNAHLRALDGAADRLVLCKADLLDYDAIRRAIDGCHGVFHTASPVTDDPEQMVEPAVRGTQYVIDAAAEAGTVRRMVLTSSIGAVTMDPNRGPDVVVDESCWSDLDFCKKTRNWYCYGKAVAEQAASELARQRGVDLVVVNPVLVIGPLLQPTVNASIGHILKYLDGSASKFANAVQAYVDVRDVADAHLRVFECAAASGRHLCAERVLHREDVVRILAKLFPEYPVPTRCSDETNPRKQPYKMSNQKLQDLGLEFRPVSQSLYETVKSLQEKGHLPVLSEQAEADKETLAAELQAGVTIRA

SEQ ID NO: 205 - protein, 364 aa, Panicum virgatum
  switchgrass cinnamoyl-CoA reductase (PvCCR)
MTVVDAVSAGAGDAAAAVPQPAGNGQTVCVTGAAGYIASWLVKLLLEKGYTVKGTVRNPDDPKNAHLKALDGAAERLILCKADLLDYDAICRAVEGCHGVFHTASPVTDDPEQMVEPAVRGTEYVISAAAEAGTVRRVVFTSSIGAVTMDPNRGPDVVVDESCWSDLDFCKKTRNWYCYGKAVAEQAAWEAARQRGVDLVVVNPVLVVGPLLQPTVNASIAHILKYLDGSARTFANAVQAYVDVRDVAAAHLRVFESPAASGRHLCAERVLHREDVVRILAKLFPEYPVPTRCSDEVNPRKQAYKFTNQKLRDLGLEFRPVSQSLYDTVKSLQEKGHLPVLADEQAPEAAPGAEAQQGGIAIRA

SEQ ID NO: 206 - protein, 374 aa, Sorghum bicolor
  sorghum cinnamoyl-CoA reductase (SbCCR)
MTVVDAVSTDAAGAAPAAAAAPVVVAQPGNGQTVCVTGAAGYIASWLVKMLLEKGYTVKGTVRNPDDPKNAHLKALDGAAERLILCKADLLDYDAICRAVQGCQGVFHTASPVTDDPEQMVEPAVRGTEYVINAAAEAGTVRRVVFTSSIGAVTMDPSRGPDVVVDESCWSDLEFCKKTRNWYCYGKAVAEQAAWDAARQRGVDLVVVNPVLVVGPLLQPTVNASIAHVLKYLDGSARTFANAVQAYVDVRDVADAHLRVFESPAASGRYLCAERVLHREDVVRILAKLFPEYPVPTRCSDEVNPRKQPYKFSNQKLRDLGLEFRPVSQSLYDTVKNLQEKGHLPVLGEQTTEADKEEANAAAEVQQGGIAIRA

SEQ ID NO: 207 - protein, 364 aa, Panicum virgatum
  switchgrass cinnamoyl-CoA reductase (PvCCR)
MTVVDAVSAGAGDAAAAVPQPAGNGQTVCVTGAAGYIASWLVKLLLEKGYTVKGTVRNPDDPKNAHLEALDGAAERLILCKADLLDYDAICRAVEGCHGVFHTASPVTDDPEQMVEPAVRGTEYVISAAAEAGTVRRVVFTSSIGAVTMDPNRGPDVVVDESCWSDLDFCKKTRNWYCYGKAVAEQAAWEAARQRGVDLVVVNPVLVVGPLLQPTVNASIAHILKYLDGSARTFANAVQAYVDVRDVAAAHLRVFESPAASGRHLCAERVLHREDVVRILAKLFPEYPVPTRCSDEVNPRKQAYKFTNQKLRDLGLEFRPVSQSLYDTVKSLQEKGHLPVLADEQAPEAAPGAEAQQGGIAIRA

SEQ ID NO: 208 - protein, 372 aa, Saccharum officiunarum
  sugarcane cinnamoyl-CoA reductase (SoCCR)
MTVVDAVSTDAAGAPAAAAAPVQQPGNGQTVCVTGAAGYIASWLVKLLLEKGYTVKGTVRNPDDPKNAHLKALDGAAERLILCKADLLDYDAICRAVQGCHGVFHTASPVTDDPEQMVEPAVRGTEYVINAAAEAGTVRRVVFTSSIGAVTMDPSRGPDVVVDESCWSDLEFCKKTRNWYCYGKAVAEQAAWDAARQRGVDLVVVNPVLVVGPLLQPTVNASIAHVVKYLDGSARTFANAVQAYVDVRDVADAHLRVFESPRASGRYLCAERVLHREDVVRILAKLFPEYPVPTRCSDEVNPRKQPYKFSNQKLRDLGLEFRPVSQSLYDTVKNLQEKGHLPVLGEQTTEADDKEAAPAAAELQQGGIAIRA

SEQ ID NO: 209 - protein, 348 aa, Hordeum vulgare
  barley cinnamoyl-CoA reductase (HvCCR)
MTVVDAAAAVAQELPGHGQTVCVTGAAGYIASWLVKLLLERGYTVKGTVRNPDDPKNAHLKALDGAAERLVLCKADLLDYDAICAAVEGCHGVFHTASPVTDDPEQMVEPAVRGTEYVIDAAADAGTVRRVVFTSSIGAVTMDPNRGPDVVVDESCWSDLEFCKKTKNWYCYGKAVAEQAAWEKARARGVDLVVVNPVLVVGPLLQPTVNASAAHILKYLDGSARKYANAVQAYVDVRDVAGAHLRVFEAPQASGRYLCAERVLHRQDVVHILAKLFPEYPVPTRCSDEVNPRKQPYKMSNQKLQDLGLKFTPVNDSLYETVKSLQEKGHLPVPRKDILAPQLDGATA

SEQ ID NO: 210 - protein, 371 aa, Zea mays
  maize cinnamoyl-CoA reductase (ZmCCR)
MTVVDAVVSSTDAGAPAAAAAPVPAGNGQTVCVTGAAGYIASWLVKLLLEKGYTVKGTVRNPDDPKNAHLRALDGAAERLILCKADLLDYDAICRAVQGCQGVFHTASPVTDDPEQMVEPAVRGTEYVINAAAEAGTVRRVVFTSSIGAVTMDPKRGPDVVVDESCWSDLEFCEKTRNWYCYGKAVAEQAAWEAARRRGVDLVVVNPVLVVGPLLQATVNASIAHILKYLDGSARTFANAVQAYVDVRDVADAHLRVFESPRASGRHLCAERVLHREDVVRILAKLFPEYPVPARCSDEVNPRKQPYKFSNQKLRDLGLQFRPVSQSLYDTVKNLQEKGHLPVLGERTTTEAADKDAPAAEMQQGGIAIRA

SEQ ID NO: 211 - protein, 323 aa, Selaginella moellendorffii
  spike moss cinnamoyl-CoA reductase (SmCCR)
MTIESVKDAVKDTVCVTGANGFVASWLVKLLLERGYTVHGTVRNPDDERNDHLKAFDGAKERLSLWKADILDYESISAATKGCQGIFHTACPVTDDLGIVQEPAVRGTLNILKAAVEHHVKRVVLTSSVGSVYMDPKRPVEEVVSEEMWSDVQYLKDTRNGYCLAKTLAESAAWEFANQNHVDMVTVNPSVVLGPLLQSTMNASTTHILKYLTGATKVYTNHCQAYVDVRDVAEAHILVYEEPSACGRYLCAENILHRGEVVEAMAKLFPDYPIPRKPKDDSPRVKSWKISTKRLQDLGLKFRPFEEYIADTVHSLQEKGFIQ

SEQ ID NO: 212 - protein, 535 aa, Arabidopsis thaliana
  xylan biosynthesis enzyme irregular xylem 8 (IRX8, GAUT12) GI:15239707
MQLHISPSLRHVTVVTGKGLREFIKVKVGSRRFSYQMVFYSLLFFTFLLRFVFVLSTVDTIDGDPSPCSSLACLGKRLKPKLLGRRVDSGNVPEAMYQVLEQPLSEQELKGRSDIPQTLQDFMSEVKRSKSDAREFAQKLKEMVTLMEQRTRTAKIQEYLYRHVASSSIPKQLHCLALKLANEHSINAAARLQLPEAELVPMLVDNNYFHFVLASDNILAASVVAKSLVQNALRPHKIVLHIITDRKTYFPMQAWFSLHPLSPAIIEVKALHHFDWLSKGKVPVLEAMEKDQRVRSQFRGGSSVIVANNKENPVVVAAKLQALSPKYNSLMNHIRIHLPELFPSLNKVVFLDDDIVIQTDLSPLWDIDMNGKVNGAVETCRGEDKFVMSKKFKSYLNFSNPTIAKNFNPEECAWAYGMNVFDLAAWRRTNISSTYYHWLDENLKSDLSLWQLGTLPPGLIAFHGHVQTIDPFWHMLGLGYQETTSYADAESAAVVHFNGRAKPWLDIAFPHLRPLWAKYLDSSDRFIKSCHIRAS

SEQ ID NO: 213 - protein, 533 aa, Populus trichocarpa
  xylan biosynthesis enzyme irregular xylem 8 (IRX8) homolog GI:224126287
MQLHISPSLRHVTVFPGKGVREFIKVRVGARRVSYRMLFYSLLFFTFLLRFVFVLSTVDSIDGETKCSTLGCLGKRLGPRILGRRLDSAVPEVMFQVLEQPLGNDELKGRSDIPQTLEEFMDEVKNTRLDAKTFALKLREMVTLLEQRTRNAKIQEYLYRHVASSSIPKQLHCLALRLASEHSTNAAARLQLPLPELVPALVDNTYFHFVLASDNVLAAAVVANSLVQNALRPQKFVLHIITDRKTYSPMQAWFSLHPLAPAIIEVKALHHFDWFAKGKVPVMEAMEKDQRVRSQFRGGSSAIVANNTEKPHIIAAKLQTLSPKYNSVMNHIRIHLPELFPSLNKVVFLDDDIVVQSDLSPLWDIDMNGKVNGAVETCRGEDKFVMSKKLKSYLNFSHPLISENFKPNECAWAYGMNIFDLEAWRKTNISTTYHHWVEENLKSDLSLWQLGTLPPGLIAFHGHVHVIDPFWHMLGLGYQENTSLADAETAGVIHFNGRAKPWLDIAFPQLRPLWAKYINFSDKFIKGCHIRPS

SEQ ID NO: 214 - protein, 532 aa, Populus trichocarpa
  xylan biosynthesis enzyme irregular xylem 8 (IRX8) homolog GI:224117396
MQLHISPSLRHVTVLPGNGVREFIKVKVRARRVSYRMLFYSLLFFTFLLRFVFLLSTADTIDAETKCSTLGCLGKRLGPRILGRRLDSAVPEVMYQVLEQPLDNDELKGRDDIPQTLEEFMDEVKNSIFDAKAFALKLREMVTLLEQRTRNAKIQEYLYRHVASSSIPKQLLCLALRLAHEHSTNAAARRQLPLPELVPALVDNSYFHFVLASDNVLAASVVANSLFQNALRPEKFVLHIITDRKTYSPMQAWFSLHPLSPAIIEVKALHHFDWFAKGKVPVLEAMEKDLRVRSRFRGGSSAIVESNTDKPHIIAAKLQTLGPKYNSVMNHIRIHLPELFPSLNKVVFLDDDIVVQTDLSPLWDIDMNGKVNGAVETCRGQDKFVMSKRLKNYLNFSHPLIAKNFNPNECAWAYGMNIFDLEAWRKTNISITYHHWVEENLKSGLSLWQLGTLPPGLIAFHGHVHVIDPFWHMLGLGYQENTSLADAETAGVIHFNGRAKPWLDIAFPQLRPLWAKYINSSDKFITGCHIRT

SEQ ID NO: 215 - protein, 528 aa, Populus trichocarpa
  xylan biosynthesis enzyme irregular xylem 8 (IRX8) homolog GI:224141469
MRSITISSSSNNGFIDLMKIKVAARHISYRTLFHTILILAFLLPFVFILTALVTLEGVNKCSSFDCLGRRLGPRLLGRVDDSGRLVKDFYKILNQVKNEEIPDGVKLPASFSHLVSEMKNNQYDARTFAFMLRAMMEKLEREIRESKFSELMNKHFAASSIPKSIHCLSLRLTDEYSSNAHARKQLPSPEFLPLLSDNSYHHFVLSTDNILAASVVVTSTIQSSLKPDNIVFHIITDKKTYAGMHSWFALNPVSPAIVEVKGVHQFDWLTRENVPVLEAVENHNGIRNYYHGNHIAGANLSDTTPRRFASKLQARSPKYISILNHLRIYIPELFPSLDKVVFLDDDVVIQRDLSPLWEIDLKGKVNGAVETCKGEDEWVMSKHFKNYFNFSHPLIAKNLDPDECAWAYGMNIFDLRAWRKTNIRETYHSWLKENLKSNLTMWKLGTLPPALIAFKGHVHPIDPSWHMLGLGYQNKTNIESVKKAAVIHYNGQAKPWLEIGFEHLRPFWTKYVNYSNDFIRNCHILDSV

SEQ ID NO: 216 - protein, 528 aa, Populus trichocarpa
  xylan biosynthesis enzyme irregular xylem 8 (IRX8) homolog GI:224077712
MRSITISSSGNNGFIDSMKIKVAARHISYRTLFHTILILAFLLPFVFILTALVTLEGVNKCSSFDCLGRRLGPRLLGRVDDSGRLVKDFYKILNQVKNEEIPDGVKLPASFNHLVSEMKNNQYDARTFAFMLRAMMEKLEREIRESKFAELMNKHFAASSIPKSIHCLSLRLTDEYSSNAHARTQLPSPEFLPLLSDNSYHHFVLSTDNILAASVVVTSTVQSSLKPDRIVFHIITDKKTYAGMHSWFALNPASPAIVEVKGVHQFDWLTRENVPVLEAVENHNGIRDYYHGNHIAGANLSDTTPRRFASKLQARSPKYISLLNHLRIYIPELFPNLDKVVFLDDDVVIQHDLSPLWEIDLQGKVNGAVETCKGEDEWVMSKHLKNYFNFSHPLIAKNLDPDECAWAYGMNIFDLHAWRNTNIRETYHSWMKENLKSNLTMWKLGTLPPSLIAFKGHVHPIDPFWHMLGLGYQNNTNIESVKKAAVIHYNGQSKPWLEIGFEHLRPFWTKYVNYSNDFIRNCHILDSV

SEQ ID NO: 217 - protein, 531 aa, Selaginella moellendorffii
  xylan biosynthesis enzyme irregular xylem 8 (IRX8) homolog GI:302803855
MQVHISPSMRRITISTSNGFLDPLKIKVAARYLSHRCLFWSILFLAFLLPFIFITTALITLEEVNKCSSMYCLGRKIGPKLHWRSDPTRQSRHVHSIVMQASKSDLPAGENVPESFSEFVAEVEANRYDGKTCILKLKAMLELQEQRTRTAKLQEAVYRHFASSGIPKSMHCLALKLTAEYSSNANARRELPSPELTYRLTDHSFHHFVLATDNVLAASVVVSSVIRNSAQPQKVVFHVVTDKKTYAAMHAWFALNPLPPAIVEVKSLHQFEWLTKDNIPVLEAMENHSDIRRYYHGDHTAGADLNVSPTILASRLQARSPKYISILNHLRIYLPELFPELDKVVFLDDDVVAQKDLSPLFGIDLNGRVNGAVETCRGEDPYVMSKRFKTYFNFSHPLIANHFDPEKCAWAYGMNVFDLQAWRRTDITKTYHYWQKQNLNSNLTLWRLGTLPPALIAFDGYVYPIDSQWHMLGLGYHVKSNLDSVQKAAVIHYNGQAKPWLDIGFSVLRPFWTKYVNYSNEFIRRCNILET

SEQ ID NO: 218 - protein, 533 aa, Arabidopsis thaliana
  xylan biosynthesis enzyme irregular xylem 8 (IRX8) GI:30678270
MQLHISPSMRSITISSSNEFIDLMKIKVAARHISYRTLFHTILILAFLLPFVFILTAVVTLEGVNKCSSFDCFGRRLGPRLLGRIDDSEQRLVRDFYKILNEVSTQEIPDGLKLPESFSQLVSDMKNNHYDAKTFALVFRAMVEKFERDLRESKFAELMNKHFAASSIPKGIHCLSLRLTDEYSSNAHARRQLPSPELLPVLSDNAYHHFVLATDNILAASVVVSSAVQSSSKPEKIVFHVITDKKTYAGMHSWFALNSVAPAIVEVKSVHQFDWLTRENVPVLEAVESHNSIRNYYHGNHIAGANLSETTPRTFASKLQSRSPKYISLLNHLRIYLPELFPNLDKVVFLDDDIVIQKDLSPLWDIDLNGKVNGAVETCRGEDVWVMSKRLRNYFNFSHPLIAKHLDPEECAWAYGMNIFDLRTWRKTNIRETYHSWLKENLKSNLTMWKLGTLPPALIAFKGHVQPIDSSWHMLGLGYQSKTNLENAKKAAVIHYNGQSKPWLEIGFEHLRPFWTKYVNYSNDFIKNCHILE

SEQ ID NO: 219 - protein, 532 aa, Arabidopsis thaliana
  xylan biosynthesis enzyme irregular xylem 8 (IRX8) GI:30685369
MQLHISPSMRSITISSSNEFIDLMKIKVAARHISYRTLFHTILILAFLLPFVFILTAVVTLEGVNKCSSIDCLGRRIGPRLLGRVDDSERLARDFYKILNEVSTQEIPDGLKLPNSFSQLVSDMKNNHYDAKTFALVLRAMMEKFERDMRESKFAELMNKHFAASSIPKGIHCLSLRLTDEYSSNAHARRQLPSPEFLPVLSDNAYHHFILSTDNILAASVVVSSAVQSSSKPEKIVFHIITDKKTYAGMHSWFALNSVAPAIVEVKGVHQFDWLTRENVPVLEAVESHNGVRDYYHGNHVAGANLTETTPRTFASKLQSRSPKYISLLNHLRIYIPELFPNLDKVVFLDDDIVVQGDLTPLWDVDLGGKVNGAVETCRGEDEWVMSKRLRNYFNFSHPLIAKHLDPEECAWAYGMNIFDLQAWRKTNIRETYHSWLRENLKSNLTMWKLGTLPPALIAFKGHVHIIDSSWHMLGLGYQSKTNIENVKKAAVIHYNGQSKPWLEIGFEHLRPFWTKYVNYSNDFIKNCHILE

SEQ ID NO: 220 - protein, 554 aa, Oryza sativa
  xylan biosynthesis enzyme irregular xylem 8 (IRX8) homolog GI:115489272
MQIRLSPSMRSITISSSGIGIGGGNGGGGGGGGGVGSGLLDLMKLKAAARHFSYRTVFHTVLILAFLLPFVFILTALVTLEGFNKCSSLDCLGRRLGPRLLGRGNDGSMRVMRDLYRMLDEINSEEVPVDLKVPDSFDEFIWDMKNNDYDLRSFAFRLKATMESMDRELRTSRLSEQLNKHYAAIAIPKGLHCLSLRLTDEYSSNALARKQLPPPELIPRLSDNSYLHFVLASDNILAASVVVSSTIRSSLKPGRIVFHVITDKKTYPAMHSWFALNTLSPAIVEVKGVHQFDWLTRENVPVLEAIETQHTVRSRFHGNHLARNSAGDSPRVFAAKLQAGSPTYTSVLNHIRIYLPELFPNLNKVVFLDDDVVVQRDLSSLWDIDLGGKVNGAVETCRGGDTWVMSKRFRNYFNFSHPLIANNFDPSECAWAYGMNIFDLSAWRKTSIKDKYHHWVRENLSSNFTLWRLGTLPPGLIAFRGHVHPIDPSWHLLGLGYQEKTDIPSVQKAAVIHYNGQSKPWLDIGFKHLQPFWTRHVNYSNEFIRNCHIMEPQL

SEQ ID NO: 221 - protein, 531 aa, Populus trichocarpa
  xylan biosynthesis enzyme irregular xylem 8 (IRX8) homolog GI:224131384
MKFYISTTGIKRVTISTTNSSAKGSTVATRRITRRTFLPVVLLLSIVLPFLFVRIAFLVLESASACNSALDCIGWGLLGGSEASLLREELTRALMEAKEGRGTNDGDYRTEGSTESFNVLVNEMTSNQQDIKTFAFRTKAMLSMMELKVQSAREQESINWHLASHGVPKSLHCLCLKLAEEYAVNAMARSHLPPPEYVSRLTDPSFHHVVLLTDNVLAASVVISSTVQHSANPEKLVFHIVTDKKTYIPMNAWFAINPIKSAAVEVKGLHQYDWSHEVNVHVKEMLEIHRLIWSHYNDNLRNANFQHEGVNRRSLEALTPSCLSLLNHLRIYIPELFPDLNKIVFLDEDVVVQHDMSSLWELDLNKKVVGAVVDSWCGDNCCPGKKYKDYLNFSYPIISSNFDHDRCVWLYGVNVFDLEAWRRVKITTNYHKWLKHNLNFGMELWQPGVHPPALLAFEGQVHPIDPSWHVGGLGYRPPQAHNIKMLGDAAVLHFSGPAKPWLDIGFPELRSLWNRHVNFSDKFIRKCRILG

SEQ ID NO: 222 - protein, 540 aa, Arabidopsis thaliana
  xylan biosynthesis enzyme irregular xylem 8 (IRX8) GI:22331857
MKFYISATGIKKVTISNPGVGIGKGSGGCAAAAAALAARRFSSRTLLLLLLLLAIVLPFIFVRFAFLVLESASVCDSPLDCMGLRLFRGGDTSLKIGEELTRALVEETTDHQDVNGRGTKGSLESFDDLVKEMTLKRRDIRAFASVTKKMLLQMERKVQSAKHHELVYWHLASHGIPKSLHCLSLRLTEEYSVNAMARMRLPPPESVSRLTDPSFHHIVLLTDNVLAASVVISSTVQNAVNPEKFVFHIVTDKKTYTPMHAWFAINSASSPVVEVKGLHQYDWPQEVNFKVREMLDIHRLIWRRHYQNLKDSDFSFVEGTHEQSLQALNPSCLALLNHLRIYIPKLFPDLNKIVLLDDDVVVQSDLSSLWETDLNGKVVGAVVDSWCGDNCCPGRKYKDYFNFSHPLISSNLVQEDCAWLSGMNVFDLKAWRQTNITEAYSTWLRLSVRSGLQLWQPGALPPTLLAFKGLTQSLEPSWHVAGLGSRSVKSPQEILKSASVLHFSGPAKPWLEISNPEVRSLWYRYVNSSDIFVRKCKIMN

SEQ ID NO: 223 - protein, 525 aa, Arabidopsis thaliana
  xylan biosynthesis enzyme irregular xylem 14 (IRX14) GI:30690793
MKLSALHQSYLNRRSNSFRSPTSLDSSVDGSGKSLIAVFWLILHCLCCLISLVLGFRFSRLVFFFLFSTSSTNLYSLPFRPDLPVKHLDVHTIGRTLDPGANGTTVVATATKSSRVVVGRHGIRIRPWPHPNPVEVMKAHQIIGRVQKEQKMIFGMKSSKMVIAVTPTYVRTFQALHLTGVMHSLMLVPYDLVWIVVEAGGATNETGLIIAKSGLRTIHVGIDQRMPNTWEDRSKLEVFMRLQALRVVREEKLDGIVMFADDSNMHSMELFDEIQNVKWFGTVSVGILAHSGNAEEMVLSMEKRKEMEKEEEEESSSLPVQGPACNSTDQLIGWHIFNTLPYAGKSAVYIDDVAAVLPQKLEWSGFVLNSRLLWEEAENKPEWVKDFGSLNENEGVESPLSLLKDPSMVEPLGSCGRQVLLWWLRVEARADSKFPPGWIIDPPLEITVAAKRTPWPDVPPEPPTKKKDQMPLSQGNTVVVIPKQQQHPTKIRKPKRKSKKSKHEPRPTDTTTQVYSSSSKHQERN

SEQ ID NO: 224 - protein, 492 aa, Arabidopsis thaliana
  xylan biosynthesis enzyme irregular xylem 14 (IRX14) GI:15240245
MKLSVFRLSYWNRRGSSFRSSPSLDPSFDGKSPSSVFWFVIHGLCCLISLILGFRFSHLVLFFLFSTSVTNLYTTPFLFAGNGGVSQLLRLKPLETATNSTVKKNSRVVVGRHGIRIRPWPHPNPIEVLRAHQLLVRVQKEQKSMYGVRSPRTVIVVTPTYVRTFQALHLTGVMHSLMLVPYDLVWIVVEAGGITNETASFIAKSGLKTIHLGFDQKMPNTWEDRHKLETKMRLHALRVVREKKLDGIVMFADDSNMHSMELFDEIQTVKWFGALSVGILAHSGNADELSSILKNEQGKNKEKPSMPIQGPSCNSSEKLVGWHIFNTQPYAKKTAVYIDEKAPVMPSKMEWSGFVLNSRLLWKESLDDKPAWVKDLSLLDDGYAEIESPLSLVKDPSMVEPLGSCGRRVLLWWLRVEARADSKFPPGWIIKSPLEITVPSKRTPWPDSSSELPAAAIKEAKSNSKPRVSKSKSYKEKQEPKAFDGVKVSATS

SEQ ID NO: 225 - protein, 510 aa, Populus trichocarpa
  xylan biosynthesis enzyme irregular xylem 14 (IRX14) homolog GI:224096716
MKFSLLQQSYNNRRSGSFRGSSAPLDSSPDNTIKSPAAIFWLFLHGICCLISLVLGFRFSRLVFFFLFSTSTTTTLYVTTPFHPLSKTSDISNPLTNSANDLPVINKTVSSRVVVGRHGIRIRPWPHPNPSEVIKAHQIIERVQREQSNQFGVKSPRSLIVVTPTYVRTFQTLHMTGVMHSLMLLPYDVVWIVVEAGGVTNETALIIAKSGVKTLHIGFNQKMPNSWEGRHRLETKMRLRALRVVREEKMDGIVMFADDSNMHSMELFDEIQNVKWFGAVSVGILVHSGGADETLLTAAAAMVDKEAEENLPNPVVPVQGPACNASNKLVGWHTFNSLPYEGKSAVYIDDRATVLPRKLEWAGFMLNSRLLWKEAEDKPEWVKDMDLVDENIENPLALLKDPSMVEPLGSCGRQVLLWWLRVEARADSKFPPGWIIDPPLEITVPSKRTPWPDAPPELPSNEKISVNQEQTAKRSSKTRSPRSKRSSRSKRKHEVVLAETQVSARHSEQN

SEQ ID NO: 226 - protein, 503 aa, Populus trichocarpa
  xylan biosynthesis enzyme irregular xylem 14 (IRX14) homolog GI:224081752
MKLSMLQQSYMNRRSASFRGSSAPLDSSTDNTIKSPAAIFWLLLHGFCCLISLVLGFRFSRLVFFFLFSTSTTTTLYIATPLPHLTKTNNNINDLPLEIPVINKTLSSSSRVVVGRHGIRIRPWPHPNPSEVMKAHQIIETVQREQRTQFGVKSPRTLIVVTPTYVRTFQTLHLTGVMHSLMLVPYDVVWIVVEAGGATNETASIIAKSSIKTFHIGFTQKMPNSWEGRHKLETKMRLRALRVVREEMMDGIVMFADDSNMHSMELFDEIQNVKWFGAVSVGILAHSGGGGESSSAVAEKDVKPNLSNPAMPVQGPACNASNKLVGWHTFDSLPYEGKSAVYIDDRATVLPRKLEWAGFVLNSRLLLKEAQDKPEWVKDLDLVDENIESPLALLKDPSMVEPLGSCGRQVLLWWLRVEARADSKFPPGWIIDPPLEITVPSKRTPWPDAPPELPSNKKLTINQEQTIKRSPKTRSPRSKRRSKRKHEAKLVETQVSTRHSEQN

SEQ ID NO: 227 - protein, 502 aa, Selaginella moellendorffii
  xylan biosynthesis enzyme irregular xylem 14 (IRX14) homolog GI:302797519
MKSGSAAAGGVLHPVLRRSLTNAASTPRKSSGSSSPERGGGGGVLIGPGPLIRLCLHAVACIASLVIGFRFSRETLLVLLIDVGIKFPYVEPGLGVRDGVQDGGGRLPEVRTKSGRVHVGRHEILIRPWPHPDSAEIYRAHALLERVQVEQQSLYGPKERKTVIAITPTFARTFQAIHLLGVMHTLRAAPGPVIWIVVEAGGRSNETASILASSRLEFVHLGVKDAMPVAWEQRRRMETRLRIEGLSHVRREKLDGLILFADDSNVHSLQLFDEIQKVKWIGALSVGLLETGSGATETASSMVAAASSAKPRLPVQGPACNETCHVVGWHVLRPSPVDGEDDSSSSSFTDVAGGLTDVATHLEWSGFVINSRAVWDEAESENEEEEASSSTMEDEQQEEDATRRKPEWINEWKEWISEDSGSPLRLAKDQGFIEALGNCGREVMLWWIRVEARADSRYPPRQVALCPTRGYHIYQLTRLPHRWSLTSPLEITVPAQRTPWPE

SEQ ID NO: 228 - protein, 263 aa, Oryza sativa
  xylan biosynthesis enzyme irregular xylem 14 (IRX14) homolog GI:115469624
MPHDWADRHATENRMRLHALRVIRERKMDGVIVFADDSNVHSLELFDEVQKVQWMGAVSVGILAHTGTADQPRLSEEDKQNMPLPVQGPACNSSGHLAGWHTFNSLPFAGKTATVVGEAAPVLPRGLEWAGFVLNSRILWKEAEGKPDWVKDLDAVGENGEEIENPLILLNDPSSVEPLGNCGKKILLWWLRVEARADSKFPQGWVIEPPLDIVVPAKRTPWPETTAELSAELVDSKQDQEGRRLSRTDRSSRSRSTTKRKEN

SEQ ID NO: 229 - protein, 351 aa, Arabidopsis thaliana
  xylan biosynthesis enzyme irregular xylem 9 (IRX9) GI:15228084
MGSLERSKKKAQVWKKAVIHFSLCFVMGFFTGFAPAGKASFFSNFETTSYTSTKSPIPPQPFENATYTQHSLLNRTLINSQSQAPAPAESREAEGETRSLSEKEDENQVKVTPRGLVIVVTPIITKDRYKNVLLRRMANTLRLVPPPLLWIVVEKHSDGEEKSSSTMLRKTGIMYRRIVFKEDFTSLESELDHQRNLALRHIEHHKLSGIVHFAGLNNIYDLDFFVKIRDIEVFGTWPMALLSANRKRVVVEGPVCESSQVLGWHLRKINNETETKPPIHISSFAFNSSILWDPERWGRPSSVEGTKQDSIKYVKQVVLEDDTKLKGLPAQDCSKIMLWRLKFPTRTRLST

SEQ ID NO: 230 - protein, 357 aa, Populus trichocarpa
  xylan biosynthesis enzyme irregular xylem 9 (IRX9) homolog GI:224140167
MGSVERSKRRVQLWKKAIVHFGLCFVMGFFTGFAPAGKASIFTSHVAASNKSQSLPQPVEMTLHQQAASTPHASNVNRSLIAETAVPAPPSSKESEHATFLGKEETESKLAPRRLAIIVTPTSTKDPYQGVFLRRLANTIRLVPPPLLWIVVEGQSDSDEVSEVLRKTGIMYRHLVFKENFTDPEAELDHQRNVALRHIEKHRLSGIVHFAGLSNVYDLGFFDEIRQIEVFGTWPMALLSANEKKVIIEGPVCDSSQVIGWHLRKMNNETDKRPPIHISSFGFNSSILWDPERWGRPSSVQQTSQNSIKFVKQVALEDETKLKGIPPEDCSKIMLWRLNLPTSKSPSYQENQEDKIV

SEQ ID NO: 231 - protein, 359 aa, Populus trichocarpa
  xylan biosynthesis enzyme irregular xylem 9 (IRX9) homolog GI:224069352
MGSLERSKKKVQLWKKAIVHFGLCFVMGFFTGFAPGGKASIFSSHVVASNKSQPVEMLHQQVASTPHASNVNRSLIAESPVPTPLSSKESEPAKFLEKEEEPKPKLLPRRLAIIVTPISTEDPYQGVFLRRLANTIRLVPPPLLWIVVEGQSDSDEVSEILRKTGIMYRHLVIKENFTDPEAELDHQRNVALRHIEQHRLSGIVHFAGLSNVYDLGFFDELRQIEVFGTWPVALLSANKNKVTIEGPVCDSSQVIGWHLKKMNNETDKRPPIHISSFGFNSSILWDPERWGRPSSVQQTSQNSIKFVKQAALEDETELKGIPPEDCSKIMLWRLNLPVSKSPSYHLSTTGSTDASRRKI

SEQ ID NO: 232 - protein, 339 aa, Oryza sativa
  xylan biosynthesis enzyme irregular xylem 9 (IRX9) homolog GI:297600755
MGSSTDHGGAGGRGKKGSGSQLWKKALLHSSLCFVMGFFTGFAPSSVSDWTSAAVSAGGVGSSHVVRSLHATGGAAVNRSLLAQAAAGAVDAGPQPLLVVVTTTESTPSAAGQRAAALTRMAHTLRLVPPPLLWVVVEANPDVAATARLLRTTGLMYRHLTYKDNFTVADAAAGKERHHQRNVALGHIEHHRLAGVVLFAGLGDTFDLRFFDQLRQIRTFGAWPVATMSQNERKVVVQGPACSSSSVAGWFSMDLSNATSPVAVGGAGYGAAAARPRELDVHGFAFNSSVLWDPERWGRYPTSEPDKSQDSVKFVQQVVLEDYSKVRGIPSDCSEVMRV

SEQ ID NO: 233 - protein, 371 aa, Oryza sativa
  xylan biosynthesis enzyme irregular xylem 9 (IRX9) homolog GI:115461821
MGTAAVAAAERPKQRRSSHLWKKALLHFSLCFVMGFFTGFAPSSSSSWRAGSGGGGGVQPRHQLAASHVAVNQQVSLVPDAAAAEAAGVGNGAVVDVGDDEGGEGARRMLIVVTTTRGERRRRRGELLRLAHTLRLVRPPVVWVVVEPAADAAATAEVLRGTGVMYRHLAFRPEENFTTADAEAHAQRNAALAHVEKHRLSGVVHFADAAGVYDAHFFDEIRQIEAFGTWPVATMSAGEKKVVVEGPLCSDSKVVGWFSRDFNDGTTRAVTYNTEADLNPAGAAGTRAHTIDVSGFAFNSSILWDPERWGRPTSLPDTSQDSIKFVQEVVLEDRTKLKGIPSDCSQIMVWQYTMPMQVHAQTSTPKTHNRR

SEQ ID NO: 234 - protein, 442 aa, Populus trichocarpa
  xylan biosynthesis enzyme irregular xylem 9 (IRX9) homolog GI:224092304
MASIRRTLSPVPRAGTLLNGEACQVASPLSKSSSSYSQSYPTSGGFLSSIFGLSDVQAFAYGVFSPRSSRPSERSKSKGQVWKRALFHFLVSFVIGVFIGLTPFVSMNLSTNPMSKHQAFSFEVVSTVGNFDKHEDMTRNATTIAERGGLENSTTLEPQVKEEESGDGNSNGTSISLSLSEDVNLVSRKLLIIVTPTHARPLQAYYLSRLAHTLKLVQPPLLWIVVEMTLQSDHTADILRRTGVMYRHLVCNKNLTDIKDRSVHQRNVALSHIEIHHLDGIVHFADDYNTYSADLFEQMRQIRRFGTWTVAKLTGNKNKDFVEGPICNGTQVIGWHVNDSRRRFRRFHADMSGFAFNSTIIWDPKRWHRPTPEPIRQLDTVRDGFQVSSFIEQVVEDESQMEGLLEDCSRVMVWLLQLQSSNSLYPPKWFLDVNLDVITQAA

SEQ ID NO: 235 - protein, 357 aa, Selaginella moellendorffii
  xylan biosynthesis enzyme irregular xylem 9 (IRX9) homolog GI:302759368
MSWMKMASARQGLDRSKARMQILRKPFFHFVLCFFVGFGIGLTPLSSGGGGAREQQRPRESFTAAKRIATEEQVVVLDSSSPLEISANSSRHPGEGRMPLQDPKKLLIIVTPTYTRPFQAMYLTRLAHTLKLVDPPLLWIVVEMPGQSLETASLLRKTGVMYRHLACEKNLTNVKDRGTQQRNLALQHIERHQLDGIVYFADDDNFYSLELFDQLREIKRFGTWPVAMLAHSKSKTILEGPVCDGHKVTGWHTNEKSKRLRRFHVDMSGFGFNSTILWDPRRWKRPTTQPVRQLDTVKEGFQETTFIEQLVEDENQMEGLPSGCSKIMVWHLHLESQIASYPSNWKMDKFLEPVIHL

SEQ ID NO: 236 - protein, 394 aa, Arabidopsis thaliana
  xylan biosynthesis enzyme irregular xylem 9-like (IRX9-like) GI:42571663
MASIRRTLSPMYHDRSHENGGSHKGFTIGGSSSKHNSSQFLSYLTKLLGVTSDPKSSRRGPWRRPFYQFLVFFLLGFVLGLTPFGKMEDVNGSDRFSFEIKQPYVEERLENRKREEAAVDAVSFVAETENGKKEVNFVPKKLLIVVTPTYNRAMQAYYLNRVAQTLRLVESPVLWIVVEGNVASFETSEILRKTGVMYRHLVCKRNMTSIKDRGVHQRNTALEHIELHKLDGIVYFADDDNIYSLELFQSLRQISRFGTWPVAMLAQSKNKAILEGPVCNGSQVIGWHTNEKSKRLRRFHVDMSGFAFNSTILWDPKRWRRPFSHPTRQLDTVKEGFQETSFIEQVVADESEMEGVPPACSSILNWHLHLDALDVPYPQGWAIQKNLQALITMK

SEQ ID NO: 237 - protein, 395 aa, Populus trichocarpa
  xylan biosynthesis enzyme irregular xylem 9 (IRX9) homolog GI:224063335
MASIRRTLSQVYQDRSYQNGVASAQAHKLFSTNNNSGKYSSLTPTSAVAAASVYLRRKGFRRSFYRCTIFFILGLLLGIFPFGQVDNDINKHDFSFEMKPPHVNVQLDTKDNFALAAVSLGVEKTTPQLDRFSRFDYVERKQVIVITPTYNRALQAYFLNRLGQVLRLVQPPLLWIVVEMTSASAETAEILRKTGVMYRHLVCVNKNNTNVKDRGVHQRNAGLEHIERHRLDGIVYFADDDNVYSLQLFESLRNISHFGTWPVAMLAQSKNKAIVEGPVCNASQVIGWHTNEKSKRLRRFHVDMSGFAFNSTILWDPKRWNRPFSNPIRQLDTVKEGFQETTFIEQVVEDESQMESVPPSCSRILNWHLHLDAHGLVYPRGWLLQKNLEVVQPIK

SEQ ID NO: 238 - protein, 446 aa, Oryza sativa
  xylan biosynthesis enzyme irregular xylem 9 (IRX9) homolog GI:115439133
MSRRNAGAMQREGSVKDWEEFDPSPSPKLAYSQSYVAMRGLLTSVASLDLVLMSSSLKSAWAAISSHKHARSLERSRSKGMSLKRAMLQLLVCFMVGIFIGFTPPFSVDLPGKIASENGRLPFDGDAIDRRQMVERQGTKLEPFVAEAESEASSEPQVEEGPPVPAMLDDEADFVEASPIVHSVNDSGIVVRKHLIIITTTSVRPHQAYYLNRLAHVLKDVPPPLLWIVAEWPYQSRETAEILRSSGIMYRHLICNRNTTNIRKIVVCQKNNAIFHIKKHRLDGIVHFADEERAYSADLFEEMRKIRRFGTWPVAIHVGTKYRVVLEGPVCKGNQVTGWHTNQRRGVSRRFPIGFSGFAFNSTILWDPQRWNSPTLESIIVHSGGRGGLQESRFIEKLVEDESQMEGLGDNCTRVMVWNFELEPPQVNYPIGWLLQRNLDAVVPIT

SEQ ID NO: 239 - protein, 338 aa, Oryza sativa
  xylan biosynthesis enzyme irregular xylem 9 (IRX9) homolog GI:115474279
MASAGGCKKKTGNSRSRSPRSPVVLRRAMLHSSLCFLVGLLAGLAAPSDWPAAAGAAVFLRTLRASNVIFSRSSNRPQQPQLVVVVTTTEQSDDSERRAAGLTRTAHALRLVSPPLLWLVVEEAPAEKHAAPPTARLLRRTGVVHRHLLMKQGDDDFSMQISMRREQQRNVALRHIEDHRIAGVVLFGGLADIYDLRLLHHLRDIRTFGAWPVATVSAYERKVMVQGPLCINTSSSSVITRGWFDMDMDMAAGGERRAAADRPPPETLMEVGGFAFSSWMLWDPHRWDRFPLSDPDASQESVKFVQRVAVEEYNQSTTRGMPDSDCSQIMLWRIQTTL

SEQ ID NO: 240 - protein, 451 aa, Oryza sativa
  xylan biosynthesis enzyme irregular xylem 9 (IRX9) homolog GI:115465403
MVSSRRNTGGIQRDGSLRDWSEFVDPSPSPKLLYSQSYVAMRGLLSSLVSMDFALLSSRLKSAWAAILSQRHTRSPERSKSRGLSCKRLAFHLFVCFMVGIFIGFMPFFSVDVSQKIVSENGRLPFDEGAVDRGMVDGKVKELETIVVEKEVDIIDESEVEESPPVPAMLDDEADFVESAPAIPDINDLDITVRKLLIIVTITTVRPQQAYYLNRLAHVLKTVQSPLLWLVVEWPDQSFQTAEILRSSGVMYRHLICRKNTTSVRKIAVCQRNTAIYHIKKHRLDGIMHFADEERSYMSDVFEEMRKIRRFGAWPVAIHTGIKYRVVLEGPICKGNRVTGWNTIQNIQKKSAVRRFPVGFSGFAFNSTMLWDPERWNRPPMDSVIVHSGGRGGLQESRFIEKLVKHERQIEGLPEDCNRVMVWNFNLEPPLLNVPPGWSLHKNLDAVIPVT

SEQ ID NO: 241 - protein, 351 aa, Oryza sativa
  xylan biosynthesis enzyme irregular xylem 9 (IRX9) homolog GI:115481434
MAAPPCPPRRPISAPCFLLCFLLGFVAGLFPFAHRHLHLDLHLPLPPPATAILVREDPPSVVVDVDTPLPAAAEERKLLLVVTPTRARPLQAYYLRRLAHTLRLAPSPLLWLVVESGAATRDTAALLRGCGVMYRHLSSPVPDAPQDRPRRRGRRQDRPAVDSRARQRNTALDHIEHHRLHGIVYFADEDNVYSLDLFYHLRDIRSFGTWPVATLAPGKSKTILQGPVCEGSRVVGWHTTDRSKNQRRFHVDMSGFAFNSSKLWDAKNRGHQAWNYIRQLDTAKEGFQETAFIEQLVEDETHMEGVPPGCSKIMNFHLHLEDKNAIYLNGWQTTQNLDVIIPLKKEARPLL

SEQ ID NO: 242 - protein, 381 aa, Oryza sativa
  xylan biosynthesis enzyme irregular xylem 9 (IRX9) homolog GI:115456794
MASIRRPHSPAKQQHLLRHGHLGPFASSSPPSSPLRHSSSSSSPRSAAHHHHHLLAAAGHTSFRRPLPRFAAFFLLGSFLGLLHFLSHLPRPLGPIPNPNSHHRHRDPFPILQHPHPPSTPHSNHKLLIVVTPTRARPSQAYYLTRMAHTLRLLHDSPLLWIVVQAGNPTPEAAAALRRTAVLHRYVGCCHNINASAPDFRPHQINAALDIVDNHRLDGVLYFADEEGVYSLHLFHHLRQIRRFATWPVPEISQHTNEVVLQGPVCKQGQVVGWHTTHDGNKLRRFHLAMSGFAFNSTMLWDPKLRSHLAWNSIRHPEMVKESLQGSAFVEQLVEDESQMEGIPADCSQIMNWHVPFGSESVVYPKGWRVATDLDVIIPLK

SEQ ID NO: 243 - protein, 448 aa, Arabidopsis thaliana
  xylan biosynthesis enzyme irregular xylem 7 (IRX7, FRA8) GI:42570324
MTTHKHRRTEKNLCFKQYYKWILCFILTLYFFASFFVDHDQDHRSSTSISKHLLTNHKPKLFASRAMFESKIHDHKLGFTSQQPNIKTDVFNNLKIYVYDLPSKFNKDWLANDRCTNHLFAAEVALHKAFLSLEGDVRTEDPYEADFFFVPVYVSCNFSTINGFPAIGHARSLINDAIKLVSTQYPFWNRTSGSDHVFTATHDFGSCFHTMEDRAIADGVPIFLRNSIILQTFGVTFNHPCQEVENVVIPPYISPESLHKTQKNIPVTKERDIWVFFRGKMELHPKNISGRFYSKRVRTNIWRSYGGDRRFYLQRQRFAGYQSEIARSVFCLCPLGWAPWSPRLVESVALGCVPVIIADGIRLPFPSTVRWPDISLTVAERDVGKLGDILEHVAATNLSVIQRNLEDPSVRRALMFNVPSREGDATWQVLEALSKKLNRSVRRSNSFL

SEQ ID NO: 244 - protein, 462 aa, Populus trichocarpa
  xylan biosynthesis enzyme irregular xylem 7 (IRX7) homolog GI:224106838
MVLEVKRPTMSNNRRGFYVRMKLLHRHAGLQQQEKKKNLCFKYYKWLLWFSLLLYFLSSCFFTHKPIPLSKTHVSESKTVVSRALFESSNSTFIQQSKNINRGLLKDLKVYIYELPSKYNTDWLANERCSNHLFASEVAIHKALSNSLDIRTFDPYEADFFFVPVYVSCNFSTVNGFPAIGHARSLLSSAVQLISSNYPFWNRSQGSDHVFVASHDYGACFHAMEERAMEDGIPEFLKRSIILQTFGVKFNHPCQDVENVVIPPYISPERVRTTLENYPLNGRRDIWAFFRGKMEVHPKNISGRYYSKKVRTVIWRKYSGDRRFYLQRHRFAGYQSEIVRSVFCLCPLGWAPWSPRLVESVALGCVPVIIADGIRLPFPTAVRWSEISLTVAEKDVANLGTLLDHVAATNLSAIQKNLWDPDVRRALLFNDRVQEGDATWQVLYALARKLDRSYRTVRLPNQ

SEQ ID NO: 245 - protein, 469 aa, Arabidopsis thaliana
  xylan biosynthesis enzyme irregular xylem 7-like (IRX7-like, F8H) GI:42568020
MSLDIKKPNITKTKKKKTGFVVKMQLNNNRGGNKRNIFIFFFFRNYYTWILWFCLSLYFFTSYFSVEDQSSPSSIRLLSNHKTSSSLPSRALIESSAIKTTSIGLFTGMKIYVYDLPASYNDDWVTASDRCASHLFAAEVAIHRALLSSDVRTLDPDEADYFFVPVYVSCNFSTSNGFPSLSHARSLLSSAVDFLSDHYPFWNRSQGSDHVFVASHDFGACFHAMEDMAIEEGIPKFMKRSIILQTFGVKYKHPCQEVEHVVIPPYIPPESVQKAIEKAPVNGRRDIWAFFRGKMEVNPKNISGRFYSKGVRTAILKKFGGRRRFYLNRHRFAGYRSEIVRSVFCLCPLGWAPWSPRLVESAVLGCVPVVIADGIQLPFSETVQWPEISLTVAEKDVRNLRKVLEHVAATNLSAIQRNLHEPVFKRALLYNVPMKEGDATWHILESLWRKLDDRSYRRSRVLSQREVDM

SEQ ID NO: 246 - protein, 427 aa, Oryza sativa
  xylan biosynthesis enzyme irregular xylem 7 (IRX7) homolog GI:115450193
MAMRGDPKQRRASASAPHGGAAHHVADKLRRHSTFLLLLLLLWFALSLYLFLSATPPPPRPAFLPSTSTPRPALRIYVYDLPARFNRHWVAADARCATHLFAAEVALHEALLAYAGRAARPDDATLFFVPVYVSCNFSTDNGFPSLSHARALLADAVDLVRAQMPYWNRSAGADHVFVASHDFGACFHPMEDVAIADGIPEFLKRSILLQTFGVQGTHVCQEADHVVIPPHVPPEVALELPEPEKAQRDIFAFFRGKMEVHPKNISGRFYSKKVRTELLQKYGRNRKFYLKRKRYGNYRSEMARSLFCLCPLGWAPWSPRLVESVLLGCIPVIIADDIRLPFPSVLQWLDISLQVAEKDVASLEMVLDHVVATNLTVIQKNLWDPVKRKALVFNRPMEEGDATWQVLRELEILLDRSQRRHVESWKR

SEQ ID NO: 247 - protein, 405 aa, Selaginella moellendorffii
  xylan biosynthesis enzyme irregular xylem 7 (IRX7) homolog GI:302786830
MEGSSNILAGALLTIMTRTVFIAREPLAQVQTNKCGPHYFVRNGCGGPLGLSSNIKVYIYDLPSSYNTDWLVDSRCSSHLFAAEVAIHQNLLRSPVRTLDPDEADFFFMPVYVSCNFTSRSGFPTLFHASDILQAAVGLVSRNMPFWDRHQGRDHVFVATHDFGACFHAMEDLAVTMGIPQFLRNSIILQTFGEKNKHPCQNVDHIQIPPYVVPAKKLPDPRSQRRKILAFFRGKMEIHPKNVSGHMYSRGVRTTIWRRFSHDRRFFIKRKRSDNYKAEMLRSVFCLCPLGWAPWSPRIVESVIQGCIPVIIADNIQLPYSHVIDWRKISVTVAERDVHKLDRILSRVAATNVSMIQANLWRDEVRQALVYNQPLVRGDATWQVLDLLSKRKNKVAEAGSRIKVA

SEQ ID NO: 248 - protein, 332 aa, Selaginella moellendorffii
  xylan biosynthesis enzyme irregular xylem 7 (IRX7) homolog GI:302826405
GLSSNIKVYIYDLPSSYNTDWLVDSRCSSHLFAAEVAIHQNLLRSPVRTLDPDEADFFFMPVYVSCNFTSRSGFPTLFHASDILQAAVGLVSRNMPFWDRHQGRDHVFVATHDFGACFHAMDLAVTMGIPQFLRNSIILQTFGEKNKHPCQNVDHIQIPPYVRRKILAFFRGKMEIHPKNVSGHMYSRGVRTTIWRRFSHDRRFFIKRKRSDNYKAEMLRSVFCLCPLGWAPWSPRIVESVIQGCIPVIIADNIQLPYSHVIDWRKISVTVAERDVHKLDRILSRVAATNVSMIQANLWRDEVRQALVYNQPLVRGDATWQVLDLLSKRKNK

SEQ ID NO: 249 - protein, 415 aa, Arabidopsis thaliana
  xylan biosynthesis enzyme irregular xylem 10-like (IRX10-like, GUT1) GI:18424516
MKLSSCVLIFLLCNTFSSISAFRLSRSQPTERISGSAGDVLEDDPVGRLKVFVYELPSKYNKKILQKDPRCLNHMFAAEIYMQRFLLSSPVRTLNPEEADWFYVPVYTTCDLTPNGLPLPFKSPRMMRSAIQLIASNWPYWNRTEGADHFFVVPHDFGACFHYQEEKAIGRGILPLLQRATLVQTFGQRNHVCLKEGSITVPPYAPPQKMQSHLIPEKTPRSIFVYFRGLFYDVGNDPEGGYYARGARAAVWENFKDNPLFDISTEHPTTYYEDMQRAIFCLCPLGWAPWSPRLVEAVIFGCIPVIIADDIVLPFADAIPWEDIGVFVDEKDVPYLDTILTSIPPEVILRKQRLLANPSMKQAMLFPQPAQPGDAFHQVLNGLARKLPHERSVYLRPGEKLLNWTAGPVADLKPW

SEQ ID NO: 250 - protein, 417 aa, Populus trichocarpa
  xylan biosynthesis enzyme irregular xylem 10 (IRX10) homolog GI:224119858
MEIWKWVFVGVLWYAGFVLSTGAVELGRSQHTERISGSAGDVLEDDPVGRLKVFVYELPRKYNKKILQKDPRCLTHMFAAEIFMHRFLLSSPVRTLNPDEADWFYTPVYTTCDLTTNGLPLPFKSPRMMRSAIQLISSNWPYWNRTEGADHFFVVPHDFGACFHYQEEKAIERGILPLLQRATLVQTFGQRNHVCLKDGSITVPPYAPPQKMQTHLIPEKTPRSIFVYFRGLFYDVGNDPEGGYYARGARAAVWENFKDNPLFDISTEHPATYYEDMQRAVFCLCPLGWAPWSPRLVEAVIFGCIPVIIADDIVLPFADAIPWEEIGVYVDEEDVPNLDTILTSIPPEVILRKQRLLANPSMKQAMLFPQPAQPGDAFHQVLNGLARKLPHDRSVYLRPGEKILNWTAGPVGDLKPW

SEQ ID NO: 251 - protein, 412 aa, Arabidopsis thaliana
  xylan biosynthesis enzyme irregular xylem 10 (IRX10, GUT2) GI:15223522
MKIHSCLSAILLFLFFSASSAKQNVRTERISGSAGDVLEDDPVGKLKVYVYELPSKYNKKLLQKDPRCLTHMFAAEIFMHRFLLSSPVRTRNPDEADWFYTPIYPTCDLTPTGLPLPFKSPRMMRSSIQLISSNWPYWNRTEGADHFFVVPHDFGACFHYQEEKAIERGILPLLQRATLVQTFGQRNHVCLDEGSITIPPFAPPQKMQAHFIPPDIPRSIFVYFRGLFYDVNNDPEGGYYARGARAAVWENFKNNPLFDISTDHPTTYYEDMQRAIFCLCPLGWAPWSPRLVEAVVFGCIPVIIADDIVLPFADAIPWEEIGVFVAEKDVPELDTILTSIPTEVILRKQRLLANPSMKRAMLFPQPAQPGDAFHQILNGLARKLPHDKSIYLKTGEKALNWTAGPVADLKPW

SEQ ID NO: 252 - protein, 412 aa, Populus trichocarpa
  xylan biosynthesis enzyme irregular xylem 10 (IRX10) homolog GI:224053575
MRTCLWVFAVVLVFGFVDGKEIERLRTERISGSAGDVLDDDPVGRLKVYVYELPSKYNKKLLQKDPRCLTHMFAAEIFMHRFLLSSPVRTLNPDEADWFYSPIYPTCDLTPMGLPLPFKSPRMMRSAIQLISSNWPYWNRTEGADHFFVVPHDFGACFHYQEEKAIERGILPLLQRSTLVQTFGQRNHVCLNEGSITIPPFAPPQKMQAHQIPPDIPRSIFVYFRGLFYDVNNDPEGGYYARGARAAVWENFKNNPLFDISTDHPTTYYEDMQRAIFCLCPLGWAPWSPRLVEAVVFGCIPVIIADDIVLPFADAIPWEEIGVFVAEEDVPNLDTILTSIPPEVILRKQRLLANPSMKRAMLFPQPAQPGDAFHQILNGLARKLPHDRSVYLKSGQNILNWTAGPVGDLKPW

SEQ ID NO: 253 - protein, 413 aa, Populus trichocarpa
  xylan biosynthesis enzyme irregular xylem 10 (IRX10) homolog GI:224075447
MRVCLWFFVVVIVFGFGDGKNADQRLRTERISGSAGDVLEDNPVGRLKVFVYELPSKYNKKLLQKDPRCLTHMFAAEIFMHRFLLSSPVRTLNPEEADWFYTPIYPTCDLTPTGLPLPFNSPRMMRSAIQLLSSNWPYWNRTEGADHFFVVPHDFGACFHYQEEKAIERGILPLLRRATLVQTFGQRNHVCLNEGSITIPPYAPPQKMQAHQIPLDTPRSIFVYFRGLFYDVNNDPEGGYYARGARAAVWENFKNNPLFDISTDHPTTYYEDMQRAIFCLCPLGWAPWSPRLVEAVVFGCIPVIIADDIVLPFADAIPWEEIGVFVAEEDVPHLDTFLTSIPPEVILRKQRLLANPSMKRAMLFPQPAQPGDAFHQILNGLARKLPHDRTVYLKPGQKVLNWTAGPAGDLKPW

SEQ ID NO: 254 - protein, 415 aa, Oryza sativa
  xylan biosynthesis enzyme irregular xylem 10 (IRX10) homolog GI:115441967, Os01g0926600
MAMRLSSAAVALALLLAATALEDVARGQDTERIEGSAGDVLEDDPVGRLKVYVYELPTKYNKKMVAKDSRCLSHMFAAEIFMHRFLLSSAIRTLNPEEADWFYTPVYTTCDLTPWGHPLPFKSPRIMRSAIQFISSHWPYWNRTDGADHFFVVPHDFGACFHYQEEKAIERGILPLLRRATLVQTFGQKDHVCLKEGSITIPPYAPPQKMKTHLVPPETPRSIFVYFRGLFYDTANDPEGGYYARGARASVWENFKNNPLFDISTDHPPTYYEDMQRSIFCLCPLGWAPWSPRLVEAVVFGCIPVIIADDIVLPFADAIPWDEIGVFVAEDDVPKLDTILTSIPMDVILRKQRLLANPSMKQAMLFPQPAQPGDAFHQILNGLGRKLPHPKSVYLDPGQKVLNWTQGPVGDLKPW

SEQ ID NO: 255 - protein, 437 aa, Selaginella moellendorffii
  xylan biosynthesis enzyme irregular xylem 10 (IRX10) homolog GI:302783378, GT47D1
MGAAWIALALGLALCASAEQQQQHERISGSAGDVLEDDPVGRLKVFVYELPVKYNRKVLEKDPRCLTHMFATEIFVHEFLLGSAVRTLNPEEADWFYTPVYTTCDLTRNGLPLPFKSPRMMRSVIQYISNQWPYWNRTEGADHFFVVPHDFGACFHYQEEKAIERGILHLLQRATLVQTFGQRYHVCLKEGSIVVPPYCPPQKMQAHLIPPSIPRSIFVYFRGLFYDYGNDPEGGYYARGARAAVWENFKDNPLFDISTEHPITYYEDMQRAIFCLCPLGWAPWSPRLVEGVIFGCIPVIIADDIVLPFADAIPWEEIGVFVAEKDVPKLDTILTSIPPEVILKKQRLLATPAMKQAMLFPQPAQPGDAFHQILNGLARKLPHDRRIYLNPGEKALNWSSGPPGDLKPCKRNTLDRESRNWHQLLQLLRHWCRVLLF

SEQ ID NO: 256 - protein, 420 aa, Oryza sativa
  xylan biosynthesis enzyme irregular xylem 10 (IRX10) homolog GI:115458146, Os04g0398600
MGSRTVGWWLLAAAVVLAAAAADSGEAERAAEQHSERISGSAGDVLEDNPVGRLKVFIYDLPRKYNKKMVNKDPRCLNHMFAAEIFMHRFLLSSAVRTLNPKEADWFYTPVYTTCDLTPAGLPLPFKSPRVMRSAIQYISHKWPFWNRTDGADHFFVVPHDFGACFHYQEEKAIERGILPLLQRATLVQTFGQENHVCLKEGSITIPPYAPPQKMQAHLIPPDTPRSIFVYFRGLFYDTGNDPEGGYYARGARASLWENFKNNPLFDISTDHPPTYYEDMQRAVFCLCPLGWAPWSPRLVEAVVFGCIPVIIADDIVLPFADAIPWEEIGVFVEEKDVPKLDTILTSMPIDDILRKQRLLANPSMKQAMLFPQPAQPRDAFHQILNGLARKLPHPEGVYLQPSDKRLNWTAGPVGDLKAW

SEQ ID NO: 257 - protein, 422 aa, Oryza sativa
  xylan biosynthesis enzyme irregular xylem 10 (IRX10) homolog GI:115441965, Os01g0926400
MGTRPCAGVASAVAAAVAVLLLAVSCFAAAATTTQKHGRMSGKGGDVLEDDPTGKLKVFVYEMPRKYNLNLLAKDSRCLQHMFAAEIFMHQFLLSSPVRTLDPEEADWFYTPAYTTCDLTPQGFPLPFRAPRIMRSAVRYVAATWPYWNRTDGADHFFLAPHDFGACFHYQEERAIERGILPVLRRATLVQTFGQRHHPCLQPGSITVPPYADPRKMEAHRISPATPRSIFVYFRGLFYDMGNDPEGGYYARGARASVWENFKDNPLFDISTEHPATYYEDMQRAIFCLCPLGWAPWSPRLVEAVVFGCIPVIIADDIVLPFADAIPWGEISVFVAEEDVPRLDTILASVPLDEVIRKQRLLASPAMKQAVLFHQPARPGDAFHQILNGLARKLPHPKGVFLEPGEKGIDWDQGLENDLKPW

SEQ ID NO: 258 - protein, 417 aa, Oryza sativa
  xylan biosynthesis enzyme irregular xylem 10 (IRX10) homolog GI:115481310, Os10g0180000
MGTRRRSARARARPPLAMPLAVLLLFACSSGVAAAAAQGIERIKDDPVGKLKVYVYELPPKYNKNIVAKDSRCLSHMFATEIFMHRFLLSSAIRTSNPDEADWFYTPVYTTCDLTPWGHPLTTKSPRMMRSAIKFISKYWPYWNRTEGADHFFVVPHDFAACFYFQEAKAIERGILPVLRRATLVQTFGQKNHACLKDGSITVPPYTPAHKIRAHLVPPETPRSIFVYFRGLFYDTSNDPEGGYYARGARASVWENFKNNPMFDISTDHPQTYYEDMQRAVFCLCPLGWAPWSPRLVEAVVFGCIPVIIADDIVLPFSDAIPWEEIAVFVAEDDVPQLDTILTSIPTEVILRKQAMLAEPSMKQTMLFPQPAEPGDGFHQVMNALARKLPHGRDVFLKPGQKVLNWTEGTREDLKPW

SEQ ID NO: 259 - protein, 462 aa, Populus trichocarpa; identical to SEQ ID NO: 244
  xylan biosynthesis enzyme irregular xylem 10 (IRX10) homolog GI:224106838

SEQ ID NO: 260 - protein, 351 aa, Arabidopsis thaliana
  xylan biosynthesis enzyme PARVUS (GATL1) GI:18394719
MSQHLLLLILLSLLLLHKPISATTIIQKFKEAPQFYNSADCPLIDDSESDDDVVAKPIFCSRRAVHVAMTLDAAYIRGSVAAVLSVLQHSSCPENIVFHFVASASADASSLRATISSSFPYLDFTVYVFNVSSVSRLISSSIRSALDCPLNYARSYLADLLPPCVRRVVYLDSDLILVDDIAKLAATDLGRDSVLAAPEYCNANFTSYFTSTFWSNPTLSLTFADRKACYFNTGVMVIDLSRWREGAYTSRIEEWMAMQKRMRIYELGSLPPFLLVFAGLIKPVNHRWNQHGLGGDNFRGLCRDLHPGPVSLLHWSGKGKPWARLDAGRPCPLDALWAPYDLLQTPFALDS

SEQ ID NO: 261 - protein, 353 aa, Populus trichocarpa
  xylan biosynthesis enzyme PARVUS homolog GI:224067335
MLMPRLIHKLTLLFLFLSLTTATITQQFKEAPQFYNSPDCHSIDQDGIDSDSESDGDKTIFCSEHAVHVAMTLDTAYIRGSMAAILSVLQHTSCPQNIAFHFVASASANTSLLRATISSSFPYLNFRVYTFDDSSVSRLISTSIRSALDCPLNYARSYLANIIPLCVRRVVYLDSDLVLVDDIAKLAATPLGEQSVLAAPEYCNANFTSYFTPTFWSNPSLSLTFADRKPCYFNTGVMVIDLDRWREGDYTTKIEEWMELQKRIRIYELGSLPPFMLVFAGDIVPVDHRWNQHGLGGDNFKGLCRDLHPGPASLLHWSGKGKPWARLDANRPCPLDALWAPYDLLQTPFALDC

SEQ ID NO: 262 - protein, 360 aa, Populus trichocarpa
  xylan biosynthesis enzyme PARVUS homolog GI:224136594
MPRLIRKLTLLFTLLFLFLSLTTNAAATTTITQQFKEAPQFYNSPECPSIDQDEIDSEAEPDGDNTIFCSEHAVHVAMTLDAAYIRGSMAAILSVLQHTSCPQNIAFHFVASASANASLLRATISSSFPYLKFRAYTFDDSSVSGLISTSIRSALDCPLNYARSYLANILPLCVRRVVYLDSDLVLVDDIAKLAATPLGEKSVLAAPEYCNANFTSYFTPTFWSNPSLSLTFADRRPCYFNTGVMVIDLDRWREGDYTTKIEEWMELQKRMRIYELGSLPPFLLVFAGDIVPVDHKWNQHGLGGDNFRGLCRDLHPGPVSLLHWSGKGKPWARLDANRPCPLDALWAPYDLLQTPFALDS

SEQ ID NO: 263 - protein, 352 aa, Populus trichocarpa
  xylan biosynthesis enzyme PARVUS homolog GI:224096902
MFKLGLKSPPPSSSPHHLLPILLLSIIIINSTATATANGKGFKEAPQFYNSPSCPSISTQDMCSQQAVHVAMTLDFPYLRGTMAAIFSILQHSSCPENIRFHFISSPSSTHLHETITSSFPYLRSQIYSFDTNPVSGLISTSIRSALDSPLNYARNYLANILPPCVPKVVYLDSDLVLVDDIASLAATPLGTGTVLAAPEYCNANFTTYFTPTFWANPMLSLTFSGRNACYFNTGVMVIDLERWREGDYTTKIVEWMELQKRMRIYELGSLPPFLLVFAGNIAAVDHKWNQHGLGGDNFRGLCRNLHPGPVSLLHWSGKGKPWVRLDANRPCPLDALWAPYDLLRTPFALES

SEQ ID NO: 264 - protein, 352 aa, Populus trichocarpa
  xylan biosynthesis enzyme PARVUS homolog GI:224133914
MYKPGRKLTLPSPPHLLLSLLLLLSIIIINATTTATVNTKRFREAPQFYNSPTCPSISTKDMCSQQAVHVAMTLDFPYLRGTMAAILSILQHSSCPENTRFHFISSPSSTYLHETITSSFPYLRSQIHPFDTNSVSGLISTSIRSALDSPLNYARNYLANILPPCVRKAVYLDSDLVLVDDIAMLAATPLGTGTVLAAPEYCNANITAYFTPTFWANPSLSLTFSGRNACYFNTGVMIIDLERWREGDYTTKIVEWMELQKRMRIYELGSLPPFLLVFAGNIAAVDHKWNQHGLGGDNFRGLCRDLHPGPVSLLHWSGKGKPWVRLDENRPCPLDALWAPYDLMQTPFAIDF

SEQ ID NO: 265 - protein, 341 aa, Arabidopsis thaliana
  xylan biosynthesis enzyme PARVUS homolog GI:79439859
MHSKFILYLSILAVFTVSFAGGERFKEAPKFFNSPECLTIENDEDFVCSDKAIHVAMTLDTAYLRGSMAVILSVLQHSSCPQNIVFHFVTSKQSHRLQNYVVASFPYLKFRIYPYDVAAISGLISTSIRSALDSPLNYARNYLADILPTCLSRVVYLDSDLILVDDISKLFSTHIPTDVVLAAPEYCNANFTTYFTPTFWSNPSLSITLSLNRRATPCYFNTGVMVIELKKWREGDYTRKIIEWMELQKRIRIYELGSLPPFLLVFAGNIAPVDHRWNQHGLGGDNFRGLCRDLHPGPVSLLHWSGKGKPWVRLDDGRPCPLDALWVPYDLLESRFDLIES

SEQ ID NO: 266 - protein, 342 aa, Populus trichocarpa
  xylan biosynthesis enzyme PARVUS homolog GI:224108539
MSLLSIFLFLNAVVFSAHGLSSAELPAFREAPAFRNGRECPKTTWLSSLNNYHDPSIIHIAMTLDATYLRGSVAGVLSVLQHAACPENVVFHFIATHRRADLRRTITSTFPYQTFHLYHFNTDLVKGKISSSIRRALDQPLNYARIYLADLLPMSVRRIIYFDSDLILVDDVAKLWNINLGAHVLGAPEYCHANFTNYFNSRFWSNSACAASLRGRRACYFNTGVMVIDLGKWREGKYTERLEYWMKVQKKYRIYELGSLPPFLLVFAGDVEGVGHRWNQHGLGGDNLEGLCRDLHPGPVSLLHWSGKGKPWLRLDSKRPCPLDYLWAPYDLYRHSSLFCDS

SEQ ID NO: 267 - protein, 346 aa, Populus trichocarpa
  xylan biosynthesis enzyme PARVUS homolog GI:224101685
MSILCIFLFLTTVVVSVQSLPNAELPAFREAPAFRNGRECPKKTWPSSFNNLNHHRHDPSIIHIAMTLDATYLRGSVAGVLSVLQHAACPEHIVFHFIATHRRADLRRTITSTFPYLTFHLYHFNTDLVRGKISSSIRRALDQPLNYARIYLADLLPFTVRRIIYFDSDLIVVDDVAKLWNINLGAHVLGAPEYCHVNFSYYFNSRFWSSPVYATSFTGRRACYFNTGVMVIDLRKWREGKYTEKLEYWMRVQKKNRIYELGSLPPFLLVFAGDVEGVEHRWNQHGLGGDNLEGLCRDLHPGPVSLLHWSGKGKPWLRLNSKRPCPLDSLWAPYDLYRHPTLFCDT

SEQ ID NO: 268 - protein, 360 aa, Oryza sativa
  xylan biosynthesis enzyme PARVUS homolog GI:297601461
MDDMAKLAQMPRAPLLVLLLMLGVGAAVAVPEYREAPHFTNSAAARCPPPLPATDADAACSPHAAVHVAMTLDAPYLRGTMAAVLSVLRHASCPESVHFHFLASSSSSPEAAAAVRELRDTVRASFPSLAFRVYPFDESRVAGLISTSIRGALDRPLNYARSYLATTLPACVRRVVYLDSDVVVTDDIAALAATPLPGEAAVAAPEYCGANFTAYFTPGFWASRALSEAAFAGRRACYFNTGVMVLDLPRWRRAGYTAQIEEWMELQRRVRIYELGSLPPFLLVFAGRIAAVDHRWNQHGLGGDNYRGLCRGLHAGAVSLLHWSGKGKPWDRLDAGKPCPLDAVWAKYDLLRPAAAIETS

SEQ ID NO: 269 - protein, 346 aa, Arabidopsis thaliana
  xylan biosynthesis enzyme PARVUS homolog GI:15235247
MLWITRFAGLFSAAMAVIVLSPSLQSFPPAAAIRSSPSPIFRKAPAVFNNGDECLSSGGVCNPSLVHVAITLDVEYLRGSIAAVNSILQHSVCPESVFFHFIAVSEETNLLESLVRSVFPRLKFNIYDFAPETVRGLISSSVRQALEQPLNYARSYLADLLEPCVNRVIYLDSDLVVVDDIAKLWKTSLGSRIIGAPEYCHANFTKYFTGGFWSEERFSGTFRGRKPCYFNTGVMVIDLKKWRRGGYTKRIEKWMEIQRRERIYELGSLPPFLLVFSGHVAPISHRWNQHGLGGDNVRGSCRDLHPGPVSLLHWSGSGKPWIRLDSKRPCPLDALWTPYDLYRHSH

SEQ ID NO: 270 - protein, 390 aa, Arabidopsis thaliana
  xylan biosynthesis enzyme PARVUS homolog GI:18409445
MRLRFPMKSAVLAFAIFLVFIPLFSVGIRMIPGRLTAVSATVGNGFDLGSFVEAPEYRNGKECVSQSLNRENFVSSCDASLVHVAMTLDSEYLRGSIAAVHSMLRHASCPENVFFHLIAAEFDPASPRVLSQLVRSTFPSLNFKVYIFREDTVINLISSSIRQALENPLNYARNYLGDILDPCVDRVIYLDSDIIVVDDITKLWNTSLTGSRIIGAPEYCHANFTKYFTSGFWSDPALPGFFSGRKPCYFNTGVMVMDLVRWREGNYREKLETWMQIQKKKRIYDLGSLPPFLLVFAGNVEAIDHRWNQHGLGGDNVRGSCRSLHKGPVSLLHWSGKGKPWVRLDEKRPCPLDHLWEPYDLYEHKIERAKDQSLFGFSSLSELTEDSSFF

SEQ ID NO: 271 - protein, 365 aa, Arabidopsis thaliana
  xylan biosynthesis enzyme PARVUS homolog GI:30689156
MMSGSRLASRLIIIFSIISTSFFTVESIRLFPDSFDDASSDLMEAPAYQNGLDCSVLAKNRLLLACDPSAVHIAMTLDPAYLRGTVSAVHSILKHTSCPENIFFHFIASGTSQGSLAKTLSSVFPSLSFKVYTFEETTVKNLISSSIRQALDSPLNYARSYLSEILSSCVSRVIYLDSDVIVVDDIQKLWKISLSGSRTIGAPEYCHANFTKYFTDSFWSDQKLSSVFDSKTPCYFNTGVMVIDLERWREGDYTRKIENWMKIQKEDKRIYELGSLPPFLLVFGGDIEAIDHQWNQHGLGGDNIVSSCRSLHPGPVSLIHWSGKGKPWVRLDDGKPCPIDYLWAPYDLHKSQRQYLQYNQELEIL

SEQ ID NO: 272 - protein, 393 aa, Arabidopsis thaliana
  xylan biosynthesis enzyme PARVUS homolog GI:15221684
MSSRFSLTVVCLIALLPFVVGIRLIPARITSVGDGGGGGGNNGFSKLGPFMEAPEYRNGKECVSSSVNRENFVSSSSSSNDPSLVHIAMTLDSEYLRGSIAAVHSVLRHASCPENVFFHFIAAEFDSASPRVLSQLVRSTFPSLNFKVYIFREDTVINLISSSIRLALENPLNYARNYLGDILDRSVERVIYLDSDVITVDDITKLWNTVLTGSRVIGAPEYCHANFTQYFTSGFWSDPALPGLISGQKPCYFNTGVMVMDLVRWREGNYREKLEQWMQLQKKMRIYDLGSLPPFLLVFAGNVEAIDHRWNQHGLGGDNIRGSCRSLHPGPVSLLHWSGKGKPWVRLDEKRPCPLDHLWEPYDLYKHKIERAKDQSLLGFASLSELTDDSSFL

SEQ ID NO: 273 - protein, 351 aa, Arabidopsis thaliana
  xylan biosynthesis enzyme PARVUS homolog GI:15230679
MASRSLSYTQLLGLLSFILLLVTTTTMAVRVGVILHKPSAPTLPVFREAPAFRNGDQCGTREADQIHIAMTLDTNYLRGTMAAVLSLLQHSTCPENLSFHFLSLPHFENDLFTSIKSTFPYLNFKIYQFDPNLVRSKISKSIRQALDQPLNYARIYLADIIPSSVDRIIYLDSDLVVVDDIEKLWHVEMEGKVVAAPEYCHANFTHYFTRTFWSDPVLVKVLEGKRPCYFNTGVMVVDVNKWRKGMYTQKVEEWMTIQKQKRIYHLGSLPPFLLIFAGDIKAVNHRWNQHGLGGDNFEGRCRTLHPGPISLLHWSGKGKPWLRLDSRKPCIVDHLWAPYDLYRSSRHSLEE

SEQ ID NO: 274 - protein, 341 aa, Oryza sativa
  xylan biosynthesis enzyme PARVUS homolog GI:115459586
MRVLAVALLAAAVLAAEAAAELPEFREAPAFRNGAGCAGAPTIHIAMTLDTTYLRGSLAGVLSVLRHAACPESIAFHFVASSASPARRLAALRRALAAAFPTLPATVHRFDARLVRGKISTSVRRALDQPLNYARIYLADLLPRSVSRVLYLDSDLLVVDDVARLWATDLGPDAALAAPEYCHANFTSYFTDAFWSHPEYSSIFTNRGRAPCYFNTGVMVIDLDRWRAGGYTVKLEYWMEVQKQEARIYELGSLPPFLLVFAGEVKAVEHRWNQHGLGGDNVAGQCRELHPGPVSLLHWSGKGKPWLRLDAGRPCPLDALWAPYDLLRRRGARDDLLAAVA

SEQ ID NO: 275 - protein, 361 aa, Arabidopsis thaliana
  xylan biosynthesis enzyme PARVUS homolog GI:15217851
MHWITRFSAFFSAALAMILLSPSLQSFSPAAAIRSSHPYADEFKPQQNSDYSSFRESPMFRNAEQCRSSGEDSGVCNPNLVHVAITLDIDYLRGSIAAVNSILQHSMCPQSVFFHFLVSSESQNLESLIRSTFPKLTNLKIYYFAPETVQSLISSSVRQALEQPLNYARNYLADLLEPCVKRVIYLDSDLVVVDDIVKLWKTGLGQRTIGAPEYCHANFTKYFTGGFWSDKRFNGTFKGRNPCYFNTGVMVIDLKKWRQFRFTKRIEKWMEIQKIERIYELGSLPPFLLVFAGHVAPISHRWNQHGLGGDNVRGSCRDLHSGPVSLLHWSGSGKPWLRLDSKLPCPLDTLWAPYDLYKHSH

SEQ ID NO: 276 - protein, 361 aa, Arabidopsis thaliana
  xylan biosynthesis enzyme PARVUS homolog GI:22331906
MLWIMRFSGLFSAALVIIVLSPSLQSFPPAEAIRSSHLDAYLRFPSSDPPPHRFSFRKAPVFRNAADCAAADIDSGVCNPSLVHVAITLDFEYLRGSIAAVHSILKHSSCPESVFFHFLVSETDLESLIRSTFPELKLKVYYFDPEIVRTLISTSVRQALEQPLNYARNYLADLLEPCVRRVIYLDSDLIVVDDIAKLWMTKLGSKTIGAPEYCHANFTKYFTPAFWSDERFSGAFSGRKPCYFNTGVMVMDLERWRRVGYTEVIEKWMEIQKSDRIYELGSLPPFLLVFAGEVAPIEHRWNQHGLGGDNVRGSCRDLHPGPVSLLHWSGSGKPWFRLDSRRPCPLDTLWAPYDLYGHYSR

SEQ ID NO: 277 - protein, 345 aa, Arabidopsis thaliana
  xylan biosynthesis enzyme PARVUS homolog GI:18391493
MSSLRLRLCLLLLLPITISCVTVTLTDLPAFREAPAFRNGRECSKTTWIPSDHEHNPSIIHIAMTLDAIYLRGSVAGVFSVLQHASCPENIVFHFIATHRRSADLRRIISSTFPYLTYHIYHFDPNLVRSKISSSIRRALDQPLNYARIYLADLLPIAVRRVIYFDSDLVVVDDVAKLWRIDLRRHVVGAPEYCHANFTNYFTSRFWSSQGYKSALKDRKPCYFNTGVMVIDLGKWRERRVTVKLETWMRIQKRHRIYELGSLPPFLLVFAGDVEPVEHRWNQHGLGGDNLEGLCRNLHPGPVSLLHWSGKGKPWLRLDSRRPCPLDSLWAPYDLFRYSPLISDS

SEQ ID NO: 278 - protein, 347 aa, Oryza sativa
  xylan biosynthesis enzyme PARVUS homolog GI:115453101
MARCGSAIAAVAALLVLLGGHAAARIRVEHSGMVIRRPSSSIPSFREAPAFRNGEECGGGGRVDVAMTLDANYLRGTMAGVLSILQHTACPESVSFHFLAAGMDADLAAAVRATFPYLDLRVYRFDPSRVRGRISRSIRHALDQPLNYARIYLADTLPPDVRRVIYLDSDVVVVDDIRALASVDLGGHVVGAPEYCHANFTNYFTDAFWSDPALNGTFAGRRPCYFNTGVMVMDVGKWRAGGYTRRVERWMEVQKQTRIYHLGSLPPFLLVLAGDIQAVDHRWNQHGLGGDNVKGRCRGLHPGPISLLHWSGKGKPWIRLDARRPCAVDYLWAPYDLFRPSSPVLEE

SEQ ID NO: 279 - protein, 368 aa, Oryza sativa
  xylan biosynthesis enzyme PARVUS homolog GI:115452521
MLWAARVSGFFSAAMVMVVLSPSLQSFPPAEAIRSSQFDSHVRFPGQIAGGARGLAFRRAPAFRNAADCGNATGNVCDPSLVHIAITLDEEYLRGSVAAVHSVVQHATCPESVFFHFLVSDPALGDLVRAVFPQLQFKVYYFDPDRVRGLISTSVRQALEQPLNYARNYLADLLEPCVRRVIYLDSDLVVVDDVAKLWRTDLGGRTVGAPEYCHANFTKYFTDRFWSDKQFAGTFAGRRPCYFNTGVMVLDLARWRRTGYTRRIERWMEIQKSPAGRIYELGSLPPFLLVFAGHVAPIEHRWNQHGLGGDNVFGSCRDLHPGPVSLLHWSGSGKPWARLGAGRPCPLDALWAPFDLYGPADSAAEGSR

SEQ ID NO: 280 - protein, 373 aa, Oryza sativa
  xylan biosynthesis enzyme PARVUS homolog GI:115448575
MGGNPAMRAGLALVVVVVAVVVGDVGAALPRFAEAPEYRNGEGCPAAVAGAGVCDPGLVHIAMTLDAHYLRGSMAAIYSLLKHASCPESIFFHFLAAADGGEGCGGGVGELRTAVAASFPSLRFEIYPFRADAVTGLISASVRAALEAPLNYARNYLADLLPKCVPRAIYLDSDVLAVDDVRRLWETRLPAAAVVAAPEYCHANFSRYFTETFWSDPQLGDRVFAGRRRAPCYFNTGVMVIDLRRWRVGNYRRRIEVWMELQKEKRIYELGSLPPFLLVFAGEVEAVDHRWNQHGLGGDNVLGSCRPLHKGPVSLMHWSGKGKPWDRLDAGKPCPLDHTWKSYDLYIAEGDSSSASAPFALSSSALPAAAFSW

SEQ ID NO: 281 - protein, 374 aa, Selaginella moellendorffii
  xylan biosynthesis enzyme PARVUS homolog GI:302807664
MVWALLVLLTILLPAMHSWAPAAEAIRSSQFGQQQLFHEAPAFRNGKECPRQRLDPAQRPGWCHDPGAIHVAMTLDRAYLRGSMAAVLSIVQHAVCPESIVFHFLIASPGHDHHPEELPMDALQSVVKQTFPYLRFKAYEFQEALVRGRISSSVRSDLEQPLNYARNYLAAMLDECIHRVIYLDSDVVVVDDIAKLWRTELRDGHVLGAPEYCAANFTRYFTPAFWSNETLASTFAARSSTPCYFNTGVMVMDLRAWRRGGYTAMLEAWMDVRKESKIYELGSLPPFLLVFAGEVEAIEHRWNQHGLGGDCVVGSCRDLHPGPVSLLHWSGKGKPWARLDSGTPCPLDSLWAPYDLFRYRHRHPQLALALSMVA

SEQ ID NO: 282 - protein, 345 aa, Artificial Sequence
  synthetic transcription factor NAC secondary wall-thickening promoting factor 1 (NST1, ANAC043) consensus sequence (Majority)
  VARIANT (27)...(27): Xaa = Gln, Lys, His, Val, Asn, Tyr, Thr or Gly
  VARIANT (145)...(145): Xaa = Ser, Ile, Trp, Asn, Ala, Val, Gly, His or Pro
  VARIANT (147)...(147): Xaa = His, Asp, Gly, Asn, Gln, Ser, Lys, Val or Thr
  VARIANT (176)...(176): Xaa = Asn, Ile, Asp, Trp, Glu, Leu, Ala, Gly, Gln or Ser
  VARIANT (183)...(183): Xaa = Gly, Leu, Cys, Ser, Thr, Phe, Ala, His, Arg or Met
  VARIANT (186)...(186): Xaa = Thr, Ser, Asp, Ala, Arg, His, Gly, Met, Lys, Asn or Pro
  VARIANT (219)...(219): Xaa = Asn, Pro, Tyr, Ser, Asp, His or Arg
  VARIANT (220)...(220): Xaa = Pro, Gly, Val, Thr, Ser, Ile, Leu or Glu
  VARIANT (224)...(224): Xaa = Asp, Val, Pro, Glu, Thr, Ala, Leu, Lys or His
  VARIANT (225)...(225): Xaa = Pro, Leu, Ser, Arg, Gly, Lys, Gln, Thr, Asn or Glu
  VARIANT (231)...(231): Xaa = Asn, Ser, Thr, Phe, Asp, Lys, Gly, Arg or Ile
  VARIANT (238)...(238): Xaa = Gln, Thr, Glu, Asp, Ala, Ile, Ser, Asn, Pro or Lys
  VARIANT (243)...(243): Xaa = Cys, Tyr, Phe, Tyr, Asn, Ala, Trp, Asp, Pro, Arg, Ser, Leu or Glu
  VARIANT (245)...(245): Xaa = Val, Trp, Thr, Phe, Asn, Gln, Pro, Leu, Met, His, Asp, Arg or Glu
  VARIANT (247)...(247): Xaa = Ser, Ile, Phe, Leu, Asp, Ala, Met, Gly or His
  VARIANT (248)...(248): Xaa = Pro, Asp, Ser, Leu, Asn, Thr, His, Ala, Phe, Ile or Gly
  VARIANT (250)...(250): Xaa = Thr, Gln, Val, Arg, Gly, Asn, Ile, Ala, Tyr or Leu
  VARIANT (258)...(258): Xaa = Pro, Gln, Met, His, Leu, Ala, Thr, Val, Tyr, Arg or Phe
  VARIANT (259)...(259): Xaa = Val, Arg, Ser, Pro, Asn, Leu, Gly, Asp, Ala or His
  VARIANT (260)...(260): Xaa = Cys, Gly, Ser, Pro, Asn, Leu, Arg, Asp, Ala or His
  VARIANT (261)...(261): Xaa = Asn, Lys, Tyr, Ser, Gly, Thr, Ala, Ile, Leu, Val or Phe
  VARIANT (262)...(262): Xaa = Val, Cys, Gln, Pro, His, Asp, Ile, Gly, Thr, Met, Arg or Ser
  VARIANT (265)...(265): Xaa = Thr, Pro, Met, Ser, Ala, Gly or His
  VARIANT (268)...(268): Xaa = Val, Ile, Leu, Glu, Asp, Asp, Asn, Thr, Ile, Met, His or Ser
  VARIANT (270)...(270): Xaa = Ser, Asn, Thr, Asp, Gly, Ala or Leu
  VARIANT (285)...(285): Xaa = Pro, Thr, His, Asn, Gln, Gly, Ala, Leu or Val
  VARIANT (286)...(286): Xaa = Thr, Asn, Asp, His, Gly, Pro, Cys, Ser, Glu or Arg
  VARIANT (289)...(289): Xaa = Gly, Asn, Ser, Glu or Asp
  VARIANT (305)...(305): Xaa = His, Glu, Ser, Asp, Pro, Val, Gly, Tyr, Phe, Ala, Met or Arg
  VARIANT (319)...(319): Xaa = Ser, Leu, Cys, Asn, Thr, Asp, Val, Phe, Lys or Pro
  VARIANT (320)...(320): Xaa = Tyr, Cys, His, Asn, Arg, Gln, Asp, Ser, Gly or Phe
  VARIANT (322)...(322): Xaa = Ala, Thr, Asn, Tyr, Trp, Pro, Ser, Met, Arg or Val
  VARIANT (323)...(323): Xaa = Gly, His, Ser, Ala, Arg, Thr, Glu or Asp
  VARIANT (324)...(324): Xaa = Leu, Gly, Pro, Arg, Phe, Ser, Asn or His
  VARIANT (326)...(326): Xaa = Gln, Pro, Asn, Arg, Ala, Val, Gly, Ser or His
  VARIANT (327)...(327): Xaa = Glu, Asp, His, Gln, Ser, Ala, Phe or Tyr
  VARIANT (331)...(331): Xaa = Pro, Asp, Thr, Asn, Ser, Lys, Ala, Gly, Val, Cys or Gln
  VARIANT (339)...(339): Xaa = Thr, Ala, Gly, Arg, Val or Leu
  VARIANT (340)...(340): Xaa = Thr, Asp, Glu, Arg, Lys, Leu or Ser
MMSISVNGQSQVPPGFRFHPTEEELLXYYLRKKVASEKIDLDVIRDVDLNKLEPWDIQEKCKIGSTPQNDWYFFSHKDKKYPTGTRTNRATAAGFWKATGRDKAIYSSGKRIGMRKTLVFYKGRAPHGQKSDWIMHEYRLDDNTXTXVSNVAGAAQEEGWVVCRVFKKKNLVKTLXSSSSSSXADXRKQLAASCNEGSLDQILEYMGRTCKEENRPHSXXDHIXXFMKLPXLESPNSXSIQNXLXPXXEXEAAITNQXXXXXLDXKFXNXWAALDRLVASQLNGXXEYXASGIADWSPLDRLAAXLLLSPDSSGQLSAXXSXXXTXXYASXEGDLWSLXXSSSLN

SEQ ID NO: 283 - protein, 334 aa, Arabidopsis thaliana; identical to SEQ ID NO: 16
  transcription factor NAC secondary wall-thickening promoting factor 2 (NST2, AtNST2, ANAC066)

SEQ ID NO: 284 - protein, 358 aa, Arabidopsis thaliana; identical to SEQ ID NO: 18
  transcription factor NAC secondary wall-thickening promoting factor 3 (NST3,  AtNST3, SND1, ANAC012)

SEQ ID NO: 285 - protein, 337 aa, Pinus taeda
  pine transcription factor NAC secondary wall-thickening promoting factor (PtNAC023)
MEAKASSGIQLPPGFRFHPSDEELIVHYLKNRVSSSPLPASIIAEIDLYKYNPWELPKKALFGVDEWYFFTPRDRKYPNGARPNRAAASGYWKATGTDKSIFNSFGTAKIGVKKTLVFYEGRPPKGLKTDWNMHEYRLLDAMIWNNSKRKGSMRLDDWVLCRVRQKNSIPRNTWQDQNIPSCASAPTGLFPKVNELQQMNINPNTEMVTNYFYDDCPMLPCIFSPQNFPSTERASSINFLSSDKSCTSFHNLLNLLKRKPAETNQQRGNCFPPGKMLRTKADIEEDVVSIRNDGTDENFSGTDQSESGNFSTEQWNSPMQYQECNHLTFTGNHLTLD

SEQ ID NO: 286 - protein, 319 aa, Medicago truncatula
  transcription factor NAC secondary wall-thickening promoting factor 1 (MtNAC1)
MPDNMSISVNGQSQVPPGFRFHPTEEELLQYYLRKKVSYEKIDLDVIRDVDLNKLEPWDIQEKCKIGTTPQNDWYFFSHKDKKYPTGTRTNRATAAGFWKATGRDKVIYSNGKRIGMRKTLVFYKGRAPHGQKSDWIMHEYRLDDNTTNDTNLVSNMIGDGGQEEGWVVCRIFKKKNHLKTLDSPSGEGRRSHHLYDTCDEGALEQILQQMGRGCKEENYEANYNNNYGRFARPFESTLNNNGGYNNERFMKLPNLESPKSTSMENNENNNDGYHAIIQVDMANENEGSFSDHHHHHHHNNMVNNPLEASSSSMVISMW

SEQ ID NO: 287 - protein, 221 aa, Glycine max
  soybean transcription factor NAC secondary wall-thickening promoting factor (GmNAM1)
MPENMSISVNGQSQVPPGFRFHPTEEELLQYYLRKKVSYEKIDLDVIRDVDLNKLEPWDIQEKCKIGTTPQNDWYFFSHKDKKYPTGTRTNRATAAGFWKATGRDKVIYSNGKRIGMRKTLVFYKGRAPHGQKSDWIMHEYRLDDNNTADTNIVSNVMGDAAQEEGWVVCRIFKKKNHLKTLDSPLASGEDRRSPKSASMESHHNTNNNNNMNSNNIKKKN

SEQ ID NO: 288 - protein, 379 aa, Pinus taeda
  pine transcription factor NAC secondary wall-thickening promoting factor (PtNAC065)
MTENMSISVNGQSQVPPGFRFHPTEEELLHYYLRKKVSYEKIDLDVIRDVDLNKLEPWDIQERCKIGTTPQNDWYFFSHKDKKYPTGTRTNRATAAGFWKATGRDKVIYSTGKRIGMRKTLVFYKGRAPHGQKSDWIMHEYRLDDSTSDTNVSNVMEEEAAQEEGWVVCRIFKKKNLNKTLDKPFSSSPISADTRNQMLSSCDEGTIDQTFHYMGRTCKEENVADNSATARYLRPVDTAINYVHHDGFMKLPSLESPNSISSQNCYQPMITDNEGSITNQMSYPLDPGLDNWATLDRLFAYQLNGQTETSRQLPCIDPTITYCTPSTDLHHDLRLPTLRSSFPLPSNRSYHGTQDYNNEIDLWNFTTRSSPDTLCQLSN

SEQ ID NO: 289 - protein, 390 aa, Vitis vinifera
  grape transcription factor NAC secondary wall-thickening promoting factor (VvNST)
MPESMSISVNGQSQVPPGFRFHPTEEELLNYYLRKKVLYEKIDLDVIRDVDLNKLEPWDIQEKCRIGSTPQNDWYFFSHKDKKYPTGTRTNRATAAGFWKATGRDKVIYSSFKRIGMRKTLVFYKGRAPHGQKSDWIMHEYRLDDNTNDTQVSNAVAEAQEEGWVVCRIFKKKNHHKTVESSSPMSSSSITAETRTQLLNSSDEGALEQIFQHMGRTCKEDNNEANNSRRFLRSIDTVINNGSTLHDRFMKLPTLESPNSTSSQNCYQPIHVQMIPENEAAPITPHPVYHLDTGLNDDWAALDRLVASHLNGQTDTSKQLACFNDPSMPFSSPTDHNDHDSQLLQPRSSSSTTRSYHPTQDYNTEIDLWSFTRSCLQSSDPLCHISNTPS

SEQ ID NO: 290 - protein, 348 aa, Ricinus communis
  transcription factor NAC secondary wall-thickening promoting factor (RcNST)
MPENMSISVNGQSQVPPGFRFHPTEEELLYYYLKKKVSYEKIDLDVIRDVDLNKLEPWDIQEKCKIGTTPQNDWYFFSHKDKKYPTGTRTNRATAAGFWKATGRDKVIYSNGRRIGMRKTLVFYKGRAPHGQKSDWIMHEYRLDDNIVDTNVSNVMGEAAQEEGWVVCRIFKKKNHHKTLDSPLSSSSFFTEARTQIFNSCNEGALGQILEEYMGRTCKEENEANNCVRFLRPIDTTINSGSSYHDKFMKLPSLESPNSSSSQNAYPPMINNNESSVSNQLNSMDANNSSLYPLESGITNWAALDRLVASQLNGQTEASRQLACFSDPTMVYCNPINQPHHDLQLLKS

SEQ ID NO: 291 - protein, 383 aa, Eucalyptus gunnii
  transcription factor NAC secondary wall-thickening promoting factor (EgNST)
MDMNLSINGQSQIPPGFRFHPTEEELLHYYLRKKMSNKKIDLDVIRDVDLNKLEPWDIQERCKIGSGPQSDWYFFSHKDKKYPTGTRTNRATAVGFWKATGRDKIIYGGSSRIGLRKTLVFYKGRAPHGQKSDWIMHEYRLDEGSNSSVGPSLVCESSPEDGWVVCRVFRKKSHQRTLESPKSTSTSSMDTEMLMNASADSSVLDQILSYMGRTNCESPENYQAPINISSMQTQLIHGKFLHLPRLDDSSHLGQETGLRTFYQKFDEIRIPGSDDPSSKHTSSDHEPKAGTAGINDWVALDRLVASQLNGQLEISAASKQSPYPGAPNPVLAGPTPGDHQVGQLSLLQLNRPNQIYSSESSFDWSFGKSSSVTPSNPLHHLSV

SEQ ID NO: 292 - protein, 380 aa, Zea mays
  maize transcription factor NAC secondary wall-thickening promoting factor (ZmNST)
MSISVNGQSCVPPGFRFHPTEEELLNYYLRKKVASQQIDLDVIRDVDLNKLEPWDIQERCKIGSGPQNDWYFFSHKDKKYPTGTRTNRATAAGFWKATGRDKAIYSAVRRMGMRKTLVFYRGRAPHGHKSDWIMHEYRLDDPDAAAVAATVAAAAASSDGGQEDGWVVCRVFQKKHHHKESSGRCRSKRGSKTEHGHGEAKTAAHQRHGCGLQYSSNDDTLDHMLGRRSCKQEHELLPLPPPAAARAASRYIRPIETVLGGHGFMKLPPLESPAAAEALTTPHAVSAGDATAAGALDGLHRAGNGITDWVMMDRMVALHLNGQAPAADQLGSCFDASADGGGLACFYSAAANRLLGGGDDDLWSFTRSSSTERLGHVSLM

SEQ ID NO: 293 - protein, 424 aa, Sorghum bicolor
  sorghum transcription factor NAC secondary wall-thickening promoting factor (SbNST)
MSISVNGQSCVPPGFRFHPTEEELLNYYLRKKVASQEIDLDVIRDVDLNKLEPWDIQEKCKIGSGPQNDWYFFSHKDKKYPTGTRTNRATAAGFWKATGRDKAIYNAVKRIGMRKTLVFYKGRAPHGQKSDWIMHEYRLDDPAASGDAAAAATAAAAATVAAAAASSDGGQEDAWVVYRVFKKKHHHKESSGGGGGSKHGGSNNEHGHGGGKAAAAAAAAAHQHHGGLQYSSSDDALDQILQYMGRSCKQEHELLSPPPPGRAASRYLRPIETVLGGHGFMKLPPLESPSAAAAMTPQAVSGDAGVVDDLLGLHRGGIGNGITDWAMMDRLVASHLNGQEAPDVAPAADQLGSCFDDATGADDADAAGLAFYSAAANRLLVGSAGSSGAGSDDDLWSFTRSSAAAAAATSTERLSHVSLMSISV

SEQ ID NO: 294 - protein, 395 aa, Oryza sativa
  rice transcription factor NAC secondary wall-thickening promoting factor (OsNAC7)
MSISVNGQSVVPPGFRFHPTEEELLTYYLKKKVASERIDLDVIRDVDLNKLEPWDIQERCRIGSGPQNDWYFFSHKDKKYPTGTRTNRATAAGFWKATGRDKAIYSSSNRIGMRKTLVFYKGRAPHGQKSDWIMHEYRLDDPSSASASVSVNLPSYYSSSSSSSSPMHGVAGDQGAQEEGWVICRVFKKKNLVHHGGGAAAASHHAAAKLAAAAMEGSPSNCSTVTVSDHVKAQMLHSSASDDALDHILQYMGRSGCKQETKPAAMSASSAAAAAALEQHLSTPQYGKFMKLPPLEHVAGGVGLLAAAGGGGEYCSAADASGIADWDTLDRLAASYELNGALSDVASGKNMAGFFDVVDQPAGAAAFSSGDGDLWSLARSVSSSLHADLTTMNNV

SEQ ID NO: 295 - protein, 428 aa, Sorghum bicolor
  sorghum transcription factor NAC secondary wall-thickening promoting factor (SbNST)
MSISVNGQSVVPPGFRFHPTEEELLTYYLKKKVASERIDLDVIRDVDLNKLEPWDIQEKCRIGSGPQNDWYFFSHKDKKYPTGTRTNRATAAGFWKATGRDKAIYASGARRIGMRKTLVFYKGRAPHGQKSDWIMHEYRLEPALDVDAAAGSASAHHAAAGAAADHHPYYTSSSPPALPTAIRGAAGDQQAAQEQEGWVICRVFKKKNLVHHGQSSGGGVTAAGSKMASAAAPMEGSPSHCSSVTVISDHTMNKHQAQAMLQHSASDDDALDHILQYMGGGGGKQPDTKPVLLDHHHHHHLAAAATTTTTACSAGGAGLYGKFMKLPPLEHAGGGGGLLPSPAGACDYGAADASGIADWDALDRLAAYELNGLSDASKNMSAFFDEPSATAAFSSSSSSVHAAAVDGDLWSLARSVSALHADLTMNNV

SEQ ID NO: 296 - protein, 401 aa, Pinus taeda
  pine transcription factor NAC secondary wall-thickening promoting factor (PtNAC)
MSISVNGQSQVPPGFRFHPTEEELLHYYLRKKVSYEKIDLDVIRDVDLNKLEPWDIQERCKIGTTPQNDWYFFSHKDKKYPTGTRTNRATAAGFWKATGRDKVIYSTGKRIGMRKTLVFYKGRAPHGQKSDWIMHEYRLDDSTSDTNVSNVMEEEAAQEEGWVVCRIFKKKNLNKTLDKPFSSSPISADTRNQMLSSCDEGTIDQTFHYMGRTCKEENVADNSATARYLRPVDTAINYVHHDGFMKLPSLESPNSISSQNCYQPMITDNEGSITNQMSYPLDPGLDNWATLDRLFAYQLNGQTETSRQLPCIDPTITYCTPSTDLHHDLRLPTLRSSFPLPSNRSYHGTQDYNNEIDLWNFTTRSSPDTLCQLSNTGAMSISVNGQSQVPPGFRFHPTEEE

SEQ ID NO: 297 - protein, 422 aa, Pinus taeda
  pine transcription factor NAC secondary wall-thickening promoting factor (PtNAC)
MPEDMVNLSINGQSQVPPGFRFHPTEEELLHYYLRKKVAYERIDLDVIREVDLNKLEPWDIQEKCKIGSTPQNDWYFFSHKDKKYPTGTRTNRATAAGFWKATGRDKIIYSGFKRIGLRKTLVFYKGRAPHGQKSDWIMHEYRLDDSTHETNVSNPIGEAIPEEGWVVCRVFRKKNYQKTLESPKGSSSSLDSKAHQILGSGNEGVLDQILMYMGRTCKMENETFSNMNISNNSNSSSLRFLSNNCISEGLHERFMHLPRLESPTLPSIPIRSPSFDQDRSFISCYHQSYDEMLTENEPSSPNQVGNGIFDMTSSSMTDHDSKSGQLNDWVTLDRLVASQLNGHEVETSKQLSCFSTDPNASFGLSPDDGMQLSHKQHSHGSSSSNIQANSSHVYSNENDLWSLTKSSSPSSSSDPLCHLSV

SEQ ID NO: 298 - protein, 428 aa, Sorghum bicolor; identical to SEQ ID NO: 295
  sorghum transcription factor NAC secondary wall-thickening promoting factor (SbNST)

SEQ ID NO: 299 - protein, 392 aa, Picea sitchensis
  spruce transcription factor NAC secondary wall-thickening promoting factor (PsNST)
MSLSVNGQSRVPPGFRFHPTEEELLYYYLKKKVSFEKIDLDVIRDVDLNKLEPWDIQERCKIGSTPQHDWYFFSHKDKKYPTGTRTNRATAAGFWKATGRDKAIHTNLKKIGMRKTLVFYKGRAPHGQKTDWIMHEYRLDDAEYPQANTFNELQEDGWVVCRVFKKRNHHKSQESAELSPKYGSKQFSNNKILSDSDCPSDNLTDPLHYTHQLNMCKQELEMQQYAFPHDQFMQLPQLESPKIPTCNNPPSSGIKRFFPDSRSGFFQLENITSSKRPCSYPMNLDMTELEGSTVTTHDHMTDFKPAEEVQNLQDWTVLDRLVASHLNGQEIETPKLGIRSYGAPNSSSDHQALVDAATVSGDQLTLLPQLRINRLNPHDYASCEIDLWNFVK

SEQ ID NO: 300 - protein, 400 aa, Malus domestica
  apple transcription factor NAC secondary wall-thickening promoting factor (AppleT)
MSDDQMSLSINGQSQVPPGFRFHPTEEELLHYYLRKKVAFERIDLDVIREVDLNKLEPWDIQEKCKIGSTPQNDWYFFSHKDKKYPTGTRTNRATTAGFWKATGRDKIIYSGFKRIGLRKTLVFYKGRAPHGQKSDWIMHEYRLDESNTHETTVSSSMGESMTEEGWVVCRVFKKKNYQKALESPKASFSMDSSNNQMHGSRNDGVLDQILMYMGRTTCKLENHDQSLTMNNISERFMHLPRLESPTLPNLPTFDQERSFKACYSAIDDMFIETEPSSTNQPSNGCHNNDLVDDHEYPKTRLNDWATLDRLVASQLGQLNGQDQETPKHLSCFGDPNMAFCSSPHPNDQDNDVQLSYPYLRTSRSSDHQSEVYNNENDLWNFTKSSSSPSSSDPLCHLSV

SEQ ID NO: 301 - protein, 396 aa, Oryza sativa
  rice transcription factor NAC secondary wall-thickening promoting factor (OsNST)
MSISVNGQSVVPPGFRFHPTEEELLTYYLKKKVASERIDLDVIRDVDLNKLEPWDIQERCRIGSGPQNDWYFFSHKDKKYPTGTRTNRATAAGFWKATGRDKAIYSSSNRIGMRKTLVFYKGRAPHGQKSDWIMHEYRLDDPSSASASVSVNLPSYYSSSSSSSSPMHGVAGDQGAQEEGWVICRVFKKKNLVHHGGGSAAASHHAAAKLAAAAMEGSPSNCSTVTVSDHVKAQMLHSSASDDALDHILQYMGRSGLQAGDQAGGDVGVVGGSGGGAGAAPQYASVRQVHEASAARGPSPAAWASWAAAGGGGEYCSAADASGIADWDTLDRLAASYELNGALSDVASGKNMAGFFDVVDQPAGAAAFSSGDGDLWSLARSVSSSLHADLTTMNNV

SEQ ID NO: 302 - protein, 433 aa, Zea mays
  maize transcription factor NAC secondary wall-thickening promoting factor (ZmNST)
MSISVNGQSVVPPGFRFHPTEEELLTYYLKKKVASERIDLDVIRDVDLNKLEPWDIQEKCRIGSGPQNDWYFFSHKDKKYPTGTRTNRATAAGFWKATGRDKAIYASPGARRIGMRKTLVFYKGRAPHGQKSDWIMHEYRLEAPVDAGAGAAHHLLLPAAEHPPYYTSPPQAPSSTTTATIRGAAGDQAAQEQEGWVICRVFKKKNLVHHGQSSGVKQQAEGDDHAASHTAAAAAHMDESSPSQCSSVTVISDHVHANVNDKQQQAQASLLMMHTHHSASSDDDALDHILQQYMGGGRQAPAPDTKPALLELDHRLHHHHLAAAPTNTRAAAGFYGKFMKLPPLEHAGLPPSPPPGAREYGAAAAAGWDDDDDALDRLAAYDHLNGLSNDASKNMAAFFDVEPSAAAAAVDGDLWSLARSVSALHADLTMNNV

SEQ ID NO: 303 - protein, 376 aa, Selaginella moellendorffii
  spike moss transcription factor NAC secondary wall-thickening promoting factor 1 (SmNST1)
MSSSIQLSGTSSVPPGFRFHPTDEELVGYYLAKKVAASKIDLDVIREIDLYKLEPWDLQERCRIGSAEQHEWYFFSHKDKKYPTGTRTNRATGAGFWKATGRDKPIFARVSKLIGMRKTLVFYKGRAPNGQKSDWIMHEYRLEDDINNTATNEEGWVVCRVFRKRNVVKKPSSDFDGACCYDPEENMDKMYSSNSSFVKQELESAGIYFPFAFDHSLPHLESPKRASPMSYNPPPEDHEHHHDLIKASSYIDNELEELVHKTFSGGGTQAPAETSFHGFSDEMVPPSWEDPERMLSSQVAGVHEDEFSKESRLGNLDSLVERMNRGQQLQQPDYSYDVDLWGFTRYLPIQFAGFCYALLSVSLPSVVSWISERAWK

SEQ ID NO: 304 - protein, 177 aa, Artificial Sequence
  synthetic transcription factor shine (SHN1, WIN1) consensus sequence (Majority)
  VARIANT (68)...(68): Xaa = Asn, Ser, Ala or Gln
  VARIANT (69)...(69): Xaa = Thr, Asn, Gly, Pro or Ser
  VARIANT (70)...(70): Xaa = Glu, Asp, His or Gly
  VARIANT (71)...(71): Xaa = Lys, Ser, Pro, Leu, Val, Ala or Thr
  VARIANT (72)...(72): Xaa = Thr, Glu, Asn, Lys, Gln, Asp, Pro or Val
  VARIANT (73)...(73): Xaa = Asp, Glu, Ser, Thr, Gln, Ala or Pro
  VARIANT (75)...(75): Xaa = Ser, Asp, Thr, Arg or Gly
  VARIANT (99)...(99): Xaa = Ser, Asp, Ala, Val, Phe, Gln or Thr
  VARIANT (125)...(125): Xaa = Ser, Glu, Gln, Pro, Lys, Ala, Thr or Arg
  VARIANT (144)...(144): Xaa = Lys, Leu, Glu, Gln, Ser, Asp, Ala or Val
  VARIANT (157)...(157): Xaa = Leu, Ile, Glu, Gly, Val, Met, Lys or Cys
MVQSKKFRGVRQRHWGSWVSEIRHPLLKRRVWLGTFETAEEAARAYDEAAILMSGRNAKTNFPVPRNXXXXXXAXGSSSSSSKSLSQILSAKLRKCCKXPSPSLTCLRLDTENSHIGVWQKRAGXRSDSNWVMTVELGKKVSSXSQSTSPTTSSEEXMDEEERIALQMIEELLNSSS

SEQ ID NO: 305 - protein, 122 aa, Arabidopsis thaliana
  transcription factor shine (AtSHN2), At5g11190
MVHSRKFRGVRQRQWGSWVSEIRHPLLKRRVWLGTFETAEAAARAYDQAALLMNGQNAKTNFPVVKSEEGSDHVKDVNSPLMLGLTTMNKQNVEKEEEEEEAIISDEDQLAMEMIEELLNWS

SEQ ID NO: 306 - protein, 189 aa, Arabidopsis thaliana; identical to SEQ ID NO: 39
  transcription factor shine (AtSHN3), At5g25390

SEQ ID NO: 307 - protein, 206 aa, Populus trichocarpa; identical to SEQ ID NO: 40
  transcription factor shine (PtSHN1)

SEQ ID NO: 308 - protein, 208 aa, Populus trichocarpa; identical to SEQ ID NO: 41
  transcription factor shine (PtSHN2)

SEQ ID NO: 309 - protein, 179 aa, Populus trichocarpa; identical to SEQ ID NO: 42
  transcription factor shine (PtSHN3)

SEQ ID NO: 310 - protein, 178 aa, Populus trichocarpa; identical to SEQ ID NO: 43
  transcription factor shine (PtSHN4)

SEQ ID NO: 311 - protein, 192 aa, Populus trichocarpa; identical to SEQ ID NO: 44
  transcription factor shine (PtSHN5)

SEQ ID NO: 312 - protein, 214 aa, Medicago truncatula; identical to SEQ ID NO: 45
  transcription factor shine (MtSHN1)

SEQ ID NO: 313 - protein, 175 aa, Medicago truncatula; identical to SEQ ID NO: 46
  transcription factor shine (MtSHN2)

SEQ ID NO: 314 - protein, 196 aa, Medicago truncatula; identical to SEQ ID NO: 47
  transcription factor shine (MtSHN3)

SEQ ID NO: 315 - protein, 208 aa, Medicago truncatula; identical to SEQ ID NO: 48
  transcription factor shine (MtSHN4)

SEQ ID NO: 316 - protein, 197 aa, Medicago truncatula; identical to SEQ ID NO: 49
  transcription factor shine (MtSHN5)

SEQ ID NO: 317 - protein, 205 aa, Oryza sativa; identical to SEQ ID NO: 50
  transcription factor shine (OsSHN1)

SEQ ID NO: 318 - protein, 225 aa, Brachypodium distachyon; identical to SEQ ID NO: 51
  transcription factor shine (BdSHN1)

SEQ ID NO: 319 - protein, 211 aa, Brachypodium distachyon; identical to SEQ ID NO: 52
  transcription factor shine (BdSHN2)

SEQ ID NO: 320 - protein, 204 aa, Zea mays; identical to SEQ ID NO: 53
  transcription factor shine (ZmSHN1)

SEQ ID NO: 321 - protein, 204 aa, Sorghum bicolor; identical to SEQ ID NO: 54
  transcription factor shine (SbSHN1)

SEQ ID NO: 322 - protein, 235 aa, Sorghum bicolor; identical to SEQ ID NO: 55
  transcription factor shine (SbSHN2)

SEQ ID NO: 323 - protein, 171 aa, Hordeum vulgare; identical to SEQ ID NO: 56
  transcription factor shine (HvSHN1)

SEQ ID NO: 324 - protein, 209 aa, Picea sitchensis; identical to SEQ ID NO: 57
  transcription factor shine (PsSHN1)

SEQ ID NO: 325 - protein, 224 aa, Selaginella moellendorffii; identical to SEQ ID NO: 58
  transcription factor shine (SmSHN1), Sm92334

SEQ ID NO: 326 - protein, 212 aa, Physcomitrella patens; identical to SEQ ID NO: 59
  transcription factor shine (PpSHN1)

SEQ ID NO: 327 - protein, 291 aa, Artificial Sequence
  synthetic MYB domain protein 96 (MYB96) consensus sequence (Majority)
  VARIANT (120)...(120): Xaa = Asn, Gln, Pro, Ser, Thr or Gly
  VARIANT (122)...(122): Xaa = Ser, Phe, Thr, Gly, Ala or Arg
  VARIANT (127)...(127): Xaa = Asn, Asp, Glu, Gly, Thr or Ala
  VARIANT (131)...(131): Xaa = Ser, Asn, Arg, Phe, Leu, Ala, Glu, Lys or Thr
  VARIANT (133)...(133): Xaa = His, Ser, Lys or Gln
  VARIANT (135)...(135): Xaa = Ser, Leu, Pro, Gln, Arg, Asp or Lys
  VARIANT (153)...(153): Xaa = Lys or Arg
  VARIANT (166)...(166): Xaa = Ile, Pro, Gly, Ser, Ala or Asn
  VARIANT (167)...(167): Xaa = Arg, Pro, Thr, Ser, Lys or Gly
  VARIANT (179)...(179): Xaa = Thr, Ser, Asn, Tyr, Ala or Pro
  VARIANT (211)...(211): Xaa = Ser, Glu, Met, Gln, Gly, Asp, Lys or Thr
  VARIANT (212)...(212): Xaa = Pro, Met, Asn, Val, Ser, Gly or Thr
  VARIANT (219)...(219): Xaa = Ala, Pro, Thr, Leu or Ser
  VARIANT (234)...(234): Xaa = Ser, Arg or Gly
  VARIANT (236)...(236): Xaa = Asn, Arg, Asp, Glu or Ala
  VARIANT (254)...(254): Xaa = Pro, Cys, Lys, Glu or Gly
  VARIANT (255)...(255): Xaa = Asp, Ile, Lys, Val, Ala or Gly
  VARIANT (259)...(259): Xaa = Ile, Glu, Ser, Pro, Ala or Thr
  VARIANT (260)...(260): Xaa = Ser, Thr, Ala or Pro
  VARIANT (266)...(266): Xaa = Phe, Leu, Met, or Ile
  VARIANT (279)...(279): Xaa = Met, Glu, Asp, Tyr, Gly, Pro, His or Ser
  VARIANT (283)...(283): Xaa = Met, Val, Leu or Gly
  VARIANT (284)...(284): Xaa = Ala, Ser, Thr, Lys, Pro, Gln or Leu
MGRPPCCDKIGVKKGPWTPEEDIILVSYIQEHGPGNWRAVPTNTGLMRCSKSCRLRWTNYLRPGIKRGNFTDQEEKMIVHLQALLGNRWAAIASYLPERTDNDIKNYWNTHLKKKLKKMXAXGDEDXSAGXSXQXANKGQWERRLQTDIHMAXQALCEALSLDKPXXPLSKPSSSSSSXTTPATYASSAENIARLLEGWMRPGPKSNSSTXXGSGSSSXAASEGGSGASASLFXFXSSQALTPETSTFTDKESXXPGPXXQPLSLXEKWLFDDGQGHEXLIDXXLEDPSLF

SEQ ID NO: 328 - DNA, 35 bp, Artificial Sequence
  synthetic amplification primer pVND6-F3-KpnI
cccgggtacctcctttacgatgttgttatgggtta

SEQ ID NO: 329 - DNA, 46 bp, Artificial Sequence
  synthetic amplification primer pVND6-R3-SpeI
cccgactagtgtgtgcgagactttggatttgatctttttaatttta

SEQ ID NO: 330 - DNA, 51 bp, Artificial Sequence
  synthetic amplification primer FY100908-C4h-GW-F
ggggacaagtttgtacaaaaaagcaggcttcatggacctcctcttgctgga

SEQ ID NO: 331 - DNA, 52 bp, Artificial Sequence
  synthetic amplification primer FY100908-C4h-GW-R
ggggaccactttgtacaagaaagctgggtcacagttccttggtttcataacg

SEQ ID NO: 332 - DNA, 55 bp, Artificial Sequence
  synthetic amplification primer DL-F5G3-At3g19450-GW
ggggacaagtttgtacaaaaaagcaggcttcatgggaagtgtagaagcaggagaa

SEQ ID NO: 333 - DNA, 54 bp, Artificial Sequence
  synthetic amplification primer DL-R5G3-At3g19450-GW
ggggaccactttgtacaagaaagctgggtcgtttgtagttgttgcagcctcctc

SEQ ID NO: 334 - DNA, 52 bp, Artificial Sequence
  synthetic amplification primer FY081508-F5h-1-GW-F
ggggacaagtttgtacaaaaaagcaggcttcatggagtcttctatatcacaa

SEQ ID NO: 335 - DNA, 51 bp, Artificial Sequence
  synthetic amplification primer FY081508-F5h-1-GW-R
ggggaccactttgtacaagaaagctgggtcaagagcacagatgaggcgcgt

SEQ ID NO: 336 - DNA, 20 bp, Artificial Sequence
  synthetic amplification primer ref3-2F1
ttccgtatcatgttcgatag

SEQ ID NO: 337 - DNA, 20 bp, Artificial Sequence
  synthetic amplification primer ref3-2R1
aatgtcaatttcccaaaatc

SEQ ID NO: 338 - DNA, 20 bp, Artificial Sequence
  synthetic amplification primer pcr-pVND6F1
caaattgccacattgcagaa

SEQ ID NO: 339 - DNA, 21 bp, Artificial Sequence
  synthetic amplification primer pcr-REF3-R1
cgacgagattacggtggttga
